United States Patent Application Publication US 2026/0265781 A1 - sequence listing, part 11

SEQ ID NO: 22 - DNA, 26290500 bp, synthetic construct (residues 21,908,751-24,099,625 of 26,290,500)
  source 1..26290500: mol_type = other DNA; note = Hot spot 1 - Chr 3 contig ref|NW_020822499.1 from Cricetulus griseus
agcttaaaaatttcatatcatgaacaaaaggctaccttgaatcatagcatcagaaaaccaaattttcagattacatatttagaaccccttgaatgaataaaacaccaggtcccttgaggaagggcattaccacaaaataaaaaaaaaagttttatgattacgttttctatcattatttctgaattagaccttgactagggcaaatgtacattaaggaaataatcagactttcagggcctattggacactgtttttaaattgtattgattctgtaaacagcactgtgaccattcagtcaaagtaggagtttctgggggcttgaggactggctccttaagagtatttcctgttcttcaagaggaccagggtttggttcccagcacccatatagggtggcttgtgacctcttgtagccccaaatggtctggcattcctctatggcttctgcaggaactcacatatatgtggcactcactaacatacacacacacacacacacacacacacacacacacacacacacacacacacactactttaaaaaaaatagaagttaaaagtggtcaaataaccaaaagaattttagcaaaggttcagattcagttttttgagtgggtccctgaattcgtcctatggttatttttacagatttctttaaaagattagtgtcatcataaaggaaatgaaagatattaaaggtgatggttgccaccacatcttcctttaactcttgtgtttgcccattcagaagactatggatcatggatgacaacggtagtgattgtcataagattagctaagtgagtattgcagttgcagctgctgctccagatgtggttttcttgcttgagcagagtaacacatctcctggtacctggtatgtagctcttgatccagtaaaagctttttttctccatatctatctgtaagcctaaaaggagcaacgtgcttacagctggcaaaaccagaaatacaccttcattgccctattgcaagagtctattaattctctatcccatgtcataacttatttcatcgggatcttgatcacttttcttacataaatatcatactgctccattacattaatgacattatgctgattggacctagttgaaggtaggtagtaattactctgggctcgtggattaaatatttgcatatcagaagatgggaaataaacccaactaaatttcaagggccttctgccttagtacaatttctaggagtctagtgatataggacatgcagagatccactttccaaaaggaagatttaattattgtagcagccccatcctgcttagtgggtctacttgagagttggaggcaatatgttccaacttgaatattgtcctagtttactttcttttgctgtgataaacaccatgaccaatgcaacttatggaggaaaggatttttgagcttacatgttccattcactgtcaatcattaaaagatgtcaaggcaggaactcaaagcaaaactccaggaactcaaacctggaggcagaaactaaagtagaagcaatggtggagtgcagctcaatggattgctctccttgtcttcccagctttcttttattacacaacccattgccaccagcacaggggtggcactgctgacagtgggatgccccctcttatgttaactattaattagagtcccacaggcttgccaacaagaaaatatgataaagacattttcgcaatgttttcttttcccaagtgaccctaggtatgtgaaggtgacaaaaaaattaaccaacataggtgttttgctctggcatgtatataatagattgaaaatatgttaggctcaaatgactattcaacaggtccaagactgttttgtctgttctaatacttgggccgcatgatccagagatccaattgtacttgaggaatcactgacagatatggatgatgttttcagcctttggcagtcttccacaggtgaatcacagtaaaggaccttgggattttggagtaaggcccttctgtcatctgcaggcaattactctttctttgagagtcattccatacttgctatttcgccttagtgaaaatagtgttggacaataggctaccaaattacctgtaactttagctgcctattgttgtgaaatatttgtttatactgtgtgaaaatatgtcactatggtgtgttcagtaaagaggtgaatggccaatagctaggcaggagaaataggcaggatttctggggagagtaaaagagaaggggaggaatctgggcaagatgaatatgtcagagaaatgccaatgagatacagagggagtcagaaaaacagaatgaaagaaaggtaaaaagccatgaggtaaaacatatattaataaaaaatatgggttaatttaagatataagagccaattgagacaagcctaatctaaaagccaaattttcataattaataagaagtctctgtatcatcatttgggagctggctggctagtgggacagaaaaagactctttacagcccatcatgaactgactgttatctgacccaccatacttaaaaagttggatgtgcccatcaaaaatgcatcatcaattggaaatgatacaatatgattgaacccaagctggaattaaatctataagtaagtaaaacaaagaaatagttcaacacatgaaactcaactcctagtacatgtactcccttcatgaaggcagagccgccaaccagtcaagtggaggttacctcagctataatcacacaaatcagtgctgagtatcactacactgaacttaaagtatcacctaacctcaccaagaccagctaagctaaggaaacacaaaatactgatccaattgctcagtcaacaattagtgaaccaatgaactctagatatacaaatcctaacacaaaaaatatgagaaacaagaaatctatattgcattcagatttttccagctccataataatgaaattcacatagataaaattccagataaatatttataaaaacaactataagtgtgctcaaagaattaaaagaggatacaaaataactcctgaatttattttaaagaatagaaataaattccttaatgaattctaaaagaacataaacagttgaatgatgtgaagaagttaagttagcatgtgaaaaaagaatttaagaaataataagaaatgttgaataaaaaggcaaaaacggaaatagagctagacatgaaaacttcaattaaaaaatagctctgtagaatgttttaccaatagaacaaatcatatggaggacacaatatcagggcttgagtaaaactccattgtgtaaatgtaccacattttttaatccattctttagttaagggatatctagattgtttccaggttctggctattacaaataaagccactatgaacatagttgaacaagtgtccttgtggaatgattgagcatcctttgggtatatgcccaagagtggtatttctgggtctttaggtagactaattcacaattttctgagaaactgccatatttatttccaaattagctatccaagtttgcactcccaccagcaatggaaaaatgttccatcctctccagcataagttgccattctgacagatataaattgaaatctcagagttgtcttgatcacaaagaaattcttaataaatataggactattaaaataatttcttatagtctattaaaataatttcttatagtctattttatcacaacaggaaaaatgagaaattaacagcaagaaatacttaagaaagtacacaaactcatgtagatgacacaacacattactgaatgatgaatgcaccattgaagaaataaagaaaataaagattgtagaactgaaggaaaatgaaacaaaatctaccaaaagctaggggcgctattgaaagctggtctatgggagtagtttatagctctaagtgcctatgtttcaaaacacaaaagatctcaaataaataactaataccccttggattatgtgaaataagagcaagccaaactccaaaatagtagatttggaaaaaaaaatgaaaatcagacaccaggaaaaaattaaaatatcaatgaaataaaaaaaaactaaaaactattaatgaaacaaagagttggttcttcaaaaaagtaatcaagattgacaaagctctaccaaattaacaaaaaagagagaagacctaattaatatgattaaagatgaaaaggacatattacaatggaacttgtgaaatgcagaaaatcataaggacataccaaaacatccatatactggagtatctgaaagaaatggatgaatttataggtatatacaatgtagcaaaattaaaccgagataaaataatctaagtagtcatataccaagtaacaagattgaagaagtaattaaaacaaagaaaagaaaaatttcacaactaaaaacagcccagtaaagctggagggaacaggaaaagaatctgggtgtggtgagaaggaagatgagcactgtactttctatctcacattttgatcctagacagaaaattttgagatttctgtgtttcagaaagcaagaaaagagtcataaatgaggagagagaaggcctttgtctggagagggaggtggcaaaacacagatgatatgataatagaaaggagaacagtagagtggaaaggtttaaattgggtcatgaaagagggatagaagaaaggtggaggttggggaggagtttcaaccaaacctacaatgtatggaaaaacacatacagaagcctacaaatgaagtaaaaagtacaatttttaaaacatttgcacagaggtaccctgtgtaggttgataatagtatcagaaatgtattaaacaaaatctcaatgccagatattggatatctccatgaatcataggccagaaaacccccagtggctcccaaaataatacaggttattgccattgctcttggatgcctattagaattagatgagaagacacaagcatctggggtccaaaacataggaaaatttaactggaaatcaagctagaatcttgctccatgcttgttactttccactgaaacagaaagtgctatgtagtttggtaaggggatgccatcaacaatgtctctgcacagtaaatcctgcaacctatttgtcaggcaaaataggtcactagtgtaattatagtaaggctgtttagggggttgtcaattgctttcaaattagattagagaatagctctatgggaggaaatatgtgcttgatcctgtaaacctggtcaaaaccctgacaatgggcaggacaggccctaacagggaagtactactaatgttttgctaaacagatacagagccaaactgctttctaaatatttatgattatacctgtagactagtatgtgagaagtgaggagagcctgtgtcaaagaagcctctttttacagagggcaataattaatacacagattcacaactggtcaaatattaagactatgtgactgttgagtactcagccataaactaggcttctgtatcattcctccaggtcttatcaaacatcacagaagaagagacagaaagattggaggagccagatgatggggaagagtcctgtgaaaagctgtcttctgggcatggcatggctgtcacaatcatgaacacactggcaatggttatcagctcaagacctgtacaaaaatttttaaaaaagacatgaggcatgcagttttgtggactggacagctatggggttctcagtgtctccagggtacaaatttccattgttaaactacccaggcccatcatataatcctatttttttaaatccctttatataacatacattcctattgcttttatttctctagacactctaatacatctcaccatctttaactgagtttatctccttggaaattgcaggtccctgcactttagtaagacttgttaacactcaactgttcatagtgatctatagaataacaatggattactatgatagtgtaagaggtgaatgagaattgtgacacctattgcttttctctgaatcaagatttggagagtaaagtgcaatctttttattgtactaataatagtaactagattttaatgtgactataccatgctgtataaagacatataagtgccgggcgttggtggcacatgcctttgatcccagcacttgggaggcagaggcaggcagctctctgtgagtttgaggacagcctggtctccagagcaagtgccaggataggctccaaagctatacaaagaaaccctgtctcgggaaaaaaaaaaaaagacatacaagagttgatagatagatagatagatagatagatagatagatagatagatagatagatagatagatagataacatataggaaggtagatagatagctgataggtaggtaataaacaggtaggtagttgataggaagactgacaaatagaactgtgttggactcatctagacagattgtatccctgtaactgataatgtcacagaaattggtgattcagaaaatgtgttttgctgccattgctgatgttttctgtcatcacttatactcattttgcaaatgtaatgccagcaccttttcactaagtttagtcttatgacacagggaaagcaactctgttcaaagtcagaaaggcattctgataatttaatgtggggtgcactgcaaagtacacgagctagctcatctgtgccccttagtgttttgaaatgtctttaacctgatccaagaggctgggcaatttctcctgtcttttaatagacaatccttatttctgtcttggtaacaacttacagataccttcattgctagagtcagataaagcaaataggttttatttttgctaggaaacataaacttgaatcccttgtccatgaacaaatatgccctttacccagtttttacaccattttccaagcacaattttgctttataataagcaacttacatactataatattgagaactattcatttatacaaaacgacatttgctagaaatgtacaaaatgaattgacaacaaaataggaatgactgtgactattgatgtatatacttgctgtaccaagcttagcacatagacgtataacttccatgattacatctaatactaatcataagacacaactaatgagatacatttatttgaaaaactgtgaaaatcttcatgccagataatactgtctgttgactaccttgatatagtattcctaagtacttccctaacaatataatattaagactatttaatcccaataacaatgaggaaaaattaccaatgaaacagcacggaagccccaaacaaaccaaataagcttaagaaccaagtgtaatcatgaagcaagaacagagaacaaacaacagaaattagttcactgtttgggaaaaatatgatcttcattccctaccaagcgaaattcttaatatattaaaggattatatgaaaagaagaaaattgtgaaataatagattgccaataggtaccagaaaactcaccttcaacaaaggaagaaatatgttttatgaataaaaaattaaatatctctagtgtagggaggtagtggagcacctgggaggagttagggagaaagaggggaatgactatgatcaaaatacattgtatgaaatcctcgaagaattagtattgttatggaatagtcttctgtacactgtgaagatgtgttgctctcattggtttaataaagagctaatcgccaacagctaggcaggaagcagttaggcaggacttgcagaaaggaaaagcagagagcatggggatgaagaagggtatagtcaccaggagacaagaacagaaccaagatgaacttgctgtgttgaaaaaaatactgagctatgtggtagtacatagatgagaaatacggcttaatttaagttgtaagggctacttaaaaacaagcctaagctattgactgagcatttgtagttaataagtctctgtattatttattggggagcacatggtcccaaagaaaaccctaccttcataatataactatgatatatttaaaaggaaatggttggttcctctcttaccacaaataatagtgccactattgtaccagtaggaactgtaggaatggaggggggattagagagggtaattgggacatgagttcacagtacatttatacaagtatgaattgtaaaactttagtaaatataattttaaagtaaaatgcttctgtacatagtaaaagacaagtaaccaatgagaaatatttgacgtatagatgtaagacatcagattaaataaagaaacacaatcaaaagatgcaagtagcaatgaaaaacattgactcacaagaaatataatattcaaattatgacatttttctttttaaaaaaataaatttagagtcattattgttatttgaacattaaggtatcagcataataacaagagaatacatcaaatgttagctgctgtaagctcaggtgatgtctgagttcttataaacacaactcatcttcaggcaatggacaagaagcagcacacaggtctcaagtgactaatggtggctattaattgtaaggtttttggctaagtcatacttgaaatatagtaaagaacagggaacaataaaacagatacacataaccaaataaacttcaggatgatagtattttgccattagtttcttcatttatttttttaatcattttttatttgaattagaaacaagattgatttacatgacaatctcagttcccttctccctcccatcgtcccctaccacccctccaactaaaaccctacctatcacataccctttcttctattcttcacctgactcaacctttctgttccctcatgacattattcatccaacaaagttttgtcttttcttaaaattcagtaagtaaataaaatgaatatttcatattgtgcacagaactgtaaattgatgagccttttctcaagggtaatttgaagatttttcaaatgtacacattttctttggcagaattacacctattgctttataaattctttccagaacccataatgaatgaaaacttgactacatgcaaaatgtttacatggaaatacatgtcacaatattagttgttatgttttttaaagtcagaatgcactttgatacacatgagtaggtagaagttggatctactaccggtaacccttttgcttacacagtgcattaagcatcaggctcgttggttagactttacagtaataccaggacacagcgatatttgaaagaaagtagtttaggcttagagagatggttcaattggtaaagcgcttgttctgcaagaattaggttgggagtttgactccccccccccatatctacttttaaaagccagctatgatggcgcactcttataataccaacactgaggagatggatccctggagctcactagtcagcaagtctagcctatggtaaattcaaggctggtgagagatttttgtctcaaaagacaaggggatggtacccgagaaccaaacagaagtcaatctgtagcttctgcagatgcatatttgtatacatatgaacaagtacacacacacataagcacaaacaaaatggaaatattcttaaatgactaaatcagtcacatttcatgacaggaaaaactttattgattttggatactttgctttgtcttctaagatactaacaataacaatgtgccatttttcaaccgggatgtaggatgcaagagagcactttggcaagcaataataaaagggcgagagcaaggcattcttatttttcctctcttaatagacaacgcagatgctaaaagccatgcccagaagacattgccttagttgtgattcacactgcttcctgaggtagacaagatgagattattattgttctatattttggatttttaaggagtaagaagacaatattcttttttattctgtaagaggaaattttcaatatacatgtatacttgactagctttaaattgtacactatgtagttgtgggtcttgataaggttatttgcaacacaaagttctcagatggtatccactgccttttgcattctgctcagaatctccccttgtctgagggctaaagaagcactcagatggaaacaaagagaatgccctgttcagtggcagagtctgcattttcatttacttaaatacagaaaaatacttacatgtaattataaatactttttaaaataaaccaaattcatatgactgagaactgggaccacatcaccgtgttctcaactggacagatcataccaaataaaggaaagttctcctctaacactggtttaaaaacaccattgtcaccatcctagaaagggcttttcgccccacccccacccccaagcatgctaaatcttctgccctctgtggtggtttgaaagaaaatgccccccccccaaggagaggcattattaggaggtgtggccttgttggaataggtgtgaccttggaggaagtgtatcaccgtggaggtgacctttgaggttttatacatgttcatgccacaccctctgagatagaccacttcctgtcgcctgtgcaagatgtagaactctcagctacctctgcagcaccatgtcttcctgcatgctgccatgtcacatcatgatgatgatagacttaacctctgaactgtactccgaccaccacaactggggtctcttaacagcaatagaaaccttaactaagataccctccttttagtaaaagaaggattcaacttacttgctcgttaaggtgagagctgctttgattgccctgccacttctatcagcttgtgaatgagaggcagcatgtctgccactttgggctagaactctgacaaacagtaggaacccaaaactatctcccctgatgcagaaggtgaaagcctcgggcagtattttactttactatctataactcagaaattttttttgcagttttaaattgttttttcttcctaacacagagaaaagctaaatgcacaactgaccttacttagctgccatttgagcagtgcaatcacaggacaagtactgggagaaatctcatcactgtagcatacaaaacttccaaactgttccaaagcagaggaaagctgagcggtggtacacttctatcggaatgctgtaaaatttaccacccttcttttttgcaaagccacacaactttaaagtgatgcctgcctgatttaatgtgtttaagcaaaaagatcctccacccccccccaaacatttctcatttgaaaacactatctgggtggcagaaactatggcatcaattacagaaatgttcctgacaacaaaaacattcaactcactagcaaaggccagccgtaaatctctctcaaatatgtacagctcataaaagtaatgggtccacaactgtgagagaaacagatgttcataaaaccagcattaaccatgaagacactggaaagtaaatgaagatgagattaatttgacaacttaattctaatgctaaattaacagaaagaactctgactcatatcagttgcattgcaatcaaaggcctactatagtgggctacaggtctagagattctgtggagggcttggtgcaaggagtcatttgaatccaccacaaacatttacttaagctatcgcttgcagaacatgagtctgtgttctcagtctttttctacaggtgacatgacaagatggacatttggtcagtttcctttctgccacacttggaaatgggagaatgctgtctcaactcaagtcagttttatcaaagcccctacagaaaaggagggaaaaatagtgggaccattagcaatgattatccccaaataccaagattggggatacaaaggccaaagtgaagctaaggtggaacttcccagagcaccaagggatgtgtaaaaacaggtgtaaacagtcatccaactctcaccaacaccagtctgttgccagaggaggacaggctctctatttacattgtgtttctacaaacaaagggatgctacagagggtgacttctgggacagagagtcctatgctacttttcatgtccacacataaagcctgaccctgaacagaagcatttccaattatgctcctgggtgtgaaggaaattctcagggtatgaaatgtgcatgtgcccctcaatcttgtagcaggcagagtttgggtggccttgtattcccagatgcctgattatgtcattgaaaagaggtaaagaggttaacaaaggactggggcaaatatatatatatatatatatatatatatatatatatatatatatatatggactcataggggcaagtttctctcagtgaaaatagaatatactaacacttaaagttttcacacttcactgaagaaatgacattaatgctaactcttggtgaaacagcaggtttgtttaggatccttatgatttctggcataacacaccagatggctgaatgtggccaaatcagccaacagatgtgaaccctcaactgggtgttcctcttcaacaaaagctaggtctgtaagcatctaatatttcaccattttggacctgttgagtcttttgctccccccatgcacattttgagctgtagatgatctcattaagtctgggcaaaagtaccaagctgtccattttcacatgaagatttgagtctatgtaactttaagctgtgtaatcagcaagatgtattggttcaatagtgagagaacaccactgcaagagataagggaatgaagaatgttacttgaccctccaggaaccaaccatgtaactgaggtacgtatgtctcactgctagagcacttacatagaattcccaagggtctcagtttgatctctctctctctttctttctctctctctctctctctctctctctctctctctctctctctctctctcacacacacacacacacacacacacacacactcacacatatacacacaattattaaagaaaaacttttctggctttgaaagtagtacagattcattataaataatttgaaacacttaaatatgcaaagagtaaaaaaattcaagtactacctggagaaaattacactttttaaaaagtcattttagaaagtgaagatgatcctgaacattctcatgtgcccccccagatcacttcctattgacaccttactttagtatggtatatgaggtatggtttctaactaagttgttacattattgttaactaaaacttctgctgtacccaagctgttagttttcacctaatgaccattttctgttccagtatctcatccaagagtgcatctcacctttaaagatctccacaggaacctcaaggctgaggtgttttctgtctcttccaatccttcaggtgcaatgctgctggtttaaatgttttgaagattttttccactctaagctaagattctgtgtcttgaagaagaagaccatagaaataaacatgattttcattgatggcatcagaggtgtgtatcatcaatatgaaccattagccattccatcgtttgaatctggagtgacctcaaagacccgtattctagaggcttgatctttaccatatgtgctgctgaaatatagtagaatctttaagatgtaagcttcagtcagatgaagtgtggctttgggcaatattgtctggaatgaggtgtgaggactgcttttctcagcattctcagctctttcctttctctgttcttctctgcttccagatactgtgagcttagcaacccgctatatgcctacttccaccatgacacacctctatatgacaaatagttgcccatggactggaattcctgaaatcaccaacaatgagccaaaattaaccttatttccttttgaatttctcaggcatggatcacagtgattgcaagctggccaacacatcattctcaatgaaaacttatcacccagtgaaggctgagttttatttattcattttatgtgctacaaaattactatttccaaaaggtcctctttgcaatgaagtcaccatatacagcctgcacacaaggaatggaaagttgtgcttgctacctcttcttgaagatgaagtacccagtaaattatttgaaattattctgtatgagaaattgctttattcaaattttatttgagtgatttcaaataaaatgttcttaatttattctataaattatatctgaaaggactcaggggtatttattaatgcaatcaggtagtcctgtgctgatttcccatgtggcttaggttgctctggctttggacactgggaactgtttctgttagatcttatgctactttagttatcctcattcttgtagaatgtgttttagatttctaagtaacattcttactttgaatctccatgcttttcttgtgtatttctagcccagccctcaagtggtccttcttccaggacatcctggctccttttgctggagtatggtacggggacaagaccaacttatcaggtttactattatttgtctgactcaaaaattctcatctgaacatgagaaacaatatttctcaatattcctatgcatgcctatattgatgttacattaaacactcgttcattaagatgtctccaattctaatctacttccacttaggggattctatccttcttcacttgattataacaacctcccattctaatgtggagaaagccaactggattccttgagctaagttgtggtgaacaaatttaaccaaaataactcacactcccttagaaagaactttatcaactagaaaatgatgcttatatacagccgctttgagacttacttttacagaatttactcatccccagttatttcaatcagcatttcttctactggatatatggcttattttgtgatattcagcattctgtcactcttagaatgattcttcttaattacattcatctggaaatggggctgtggctccatcagcagagtatttgcctattatgcatgaagctctagattcaatccccagcactgtgtagaactaagtatggtgatgcatgcctgcaatcccagaactcagaagataaaggctggagggccaggagttcagtcattctcggctacatggtgagtgcaaggtcatcctgaggtacatgaaatactgtctttttaaaatgacataattttactctttgtgctataaaattttgggggaattcatagttctcatataccattacaatcacaaagatagctgtaccaccctaacacaaattatccatgttttacccatgcaactgcccccctctccttgtgagcatgtgaccaccgatgacattttactatcttcataattttaccacttataaaaactcttataattgtactcatagaacatgtaattggaactctcagcaatgttgcctcattgctccacatcattactagccattttgttgtcaatattcagacttaagccattccatttttcttatctgtttgtgtgtgtattgtgaggaagttatggaagtcaacagtgggtgctttcatctatcactctccaccttactttttgagacagagtttctgtgaagctggggatcatcagtttggagaggatggctggccagcaagccccagagcaatccatctccaactcctcaacactgagattacagcacactttgctttacctgctttctctatgggtattggggattggaacttagttccccatgcttgcatggcaagcagtgtagcaacctggctatgacccttcagtcattctaatgcatgtacagcagttgttttaatttgtgatttcttaataacaaaccttaatatcctcattgccaatcatatttcctttaatgaaatgtcctccaatgtatttttctgtagtattattgtagtttttgaagagatgctcccattttatataaactttaaaactagtgtgttggtatgattgtattttgtgaagtctaggtcaaattggggaaaaaatgaacacctcagcccttaacctaccaatccatgaacataaagcaattctccatttcatcagattttttaagttcttccatcaagtttttagttttctgcataaggatttggtatgtatgtgtttagatttgtacctgtgtgtgtcatttttttatttttatgtatttattttaattttgtgaatatgggtgttttgtctacatgtatgtctgtctgtcccttgcaagcctgatgcacacagaagctagaaaaggaagtgaatttagagatccttgtgagtcacaaatgtgggtgatgggaactaaccttgatcttttgcaagagcagcaagtgccattggccattgaaacctctctccaggccctatgcatttcattgtctcattgtgcttgtgaacatcattttatcgattattgctggtacttagggaaacaattgctatttatattaagattatatccttagagctcgatattgatgcttcttagttccatgatacttttattgctgtcagttctttgcttttgctataatctttataaacagtcatgtcatctaaacatgaaagctactttgcctcttccctctcaatctttatttcttaccttttcttgtcttcttgcactatctggtaccagtgatgatgttagtgagaaggaatttcctttccttgttcctgatatttgagttatatgtaacattttactgatttagacattagaaagtaaaataaaatacgtttttggattttcactttgaatttttccattcttgattttaaaattgaaaatgattattcaggatttcttataaaaatgtattggtttatcaactagttgataaactagtccataatttattggatgttagatttttctcacacttgctatcattcttctttgatatgtattcttagaattagaaagtatggatcaaagagaattctcacatttttttcttcatgttggttaagtactcttcaatagtattgtatcaattaaccactcaataacaaggggttttaatatgtcataacttgactatcctcttcataataagaaatgctttatttattttagatagtgatttggtttgtaaacatagtgtctatttatttattgtatatgcttgataattgtagtgattatttgtgagatatttattcattgtattttcaaatgtctctcctacccattggcatctttcaccttagaactatctgctattttgccagttttcttatttatatgtttagcttttattcatttattcataaaactctttttttggtttttcaagatagggtttctctacatagctttggagcctgtcctggcaattgctctgtagaccaggctggtctcaaattcacagagatccacctgcctctgcctcctattccattttcaacacttaactctgtatctggaacttaagggtttaacatgtaaagccatgatgtaattttattccattataacaaaaacaatactaaataatattcctttcttccatgacatactaggctctagagtatggctttgtgtctgtatagtgggtttcataactgtgtttgggtcttgcagtactcattgttgtaatgaactatggaatgtttttaataactgtggtcctttcttatatattttaataatctatgtgctcctaatctgtttttaacttcaaaataaattgtacaattttccaatttaatttggattgcatgcttaagcttggaacaatagttaatttataagatattggatattaatatccaggaacatattttgttgttttttttttacaagactcatctttaatgcctattagaaaagttttgtggtagtcttccttgctgattcctcatagttcttaaatttgtcactaagtggtttatacttatgttgttttagaatcctagaggatgatgacttttatatgtttcatggtcatttctaaattatacgtttggattttttgatgacaaagggcaagattagatgtgaatccagtaagtcatctttggagtcatagttctcaaatcatctgtatcacatgtatcttttatctgtgtgatctggctcaaaaccaatttcacaacaatttcaggcctagtatttatagccatgtgctgctcctatttgctctgaggcaggcattaaatttgtgtcgtttttagagatctgaaccctagctgatgttataatcacctgtaagtttagacctctggttgcctgggtactgggtatccatgctggatgacaactcaagaacccctgtaaatgggagcttgaccttagaacttttaaaaattccagcagtgattctatgcaactagagttaatcctcagattatctttcctatcagacctagggaaatggtctgctgaaactgtttcctcatatagccttcctgttttgaatctgtctgctatacttacctattttaaaaaatttattattattttgtcttattttatgcatatgagtatttgtcagtatggatgtgtatgtaccatgcctggtaccaatggaagtcagaacagagcataggatcccctggaactggagttatagatgtgggtactgaaaatcaaaccctggtcctctataaaaacagctggtgctcttaagccaccgagccatctctttgtccccagttatactgattttgttaacatgtttgtgtactaacaacacagcctgcgcatgtcatcattcagctgaatatactggttcatacgcacatgagcacatatactcacagaccagggcttgagtcttcactctctacagaacaaatctatagatggtcttgtagttaagactgctcacagatgtgcccttcccaaatcctctaacagcaatgtcctccttattggtagtcttcatctattagttcagatgcattctcctcttcactgtcttaggcagtaatatctccttgtttagatcctttgggaatttagtccgtctactcttctcttttaacaaagttgtactgtttatacttgttgccttatagtgtatccaatacaaagaagtagtaagtagtagtactattagaatgtgttaggaataacttgacagatatgtaaagttacccgttctgaatagaaaaataataataattctataaaatgcaactgagaaattatcatgcttaaagctaccaaaatttatatgagcactagccagaggcttaatattcactatgaaaaccagacaaagccagaactaggattaaaaatagagggacaataggaaaaataagacagatggtaggaaacactatgtctactaaaatcaaatgattggagtccatgggtcacatatactacatctgtgatgatcttcaagtaatttcagtggttcttagcccttgatcctctttacaactatggatgataaaatttaaagtatatgaaatccaaattttaacattgcatcatactattcaaggacacatctgtaaaatatgtttatatttatgttttccagctttaatctagagcaaatgcatgtgtgcatgtatgtgtttaatcctgaaattacatggaagatgtgatctgacacagggaaatcactctactaaataaataaagtttcaattaaatatctgagtgaaggtaaattcattgtccttaccataaagaaagaaattgatgttccagactcaaagttatcccaattcaccattcacctgctcttcattacccaagaggattgaagttagagtttcaactaatgtcctttattggcaggatatatgggtgttttatggcttagatggtgcttagggtgtttgaaaaatacctctataaagtaaaacatttgaaataataaaaactctcactctgcaaaggaaacctatgatgacatttctttgtgatacaaacttaatgattcagccagactggcttaccaatgagctccaggaatgcccctgtctcttcctgactacccctcccagcactgtggttaaagataaataacagtgtcatgcccaacttaagcaggtgctacagattcagactcagatcctcatgctcacacagcaatccctccagcctttatggatcaagaaatatttaacaagaataatatactcattaatgtctgaacagcaaaccttgtcagagtttagagcatctggaatgaatgtataaatcataaggatataatttgcacatataaataaaaaaacgaatctactgtgaagaatgacagaacaacctagacagctaaagccgcatttgctatacaatatggtagctaccagacacatgcaactgctaagcatttgaacttcacttttccaactgaagatgcattggtaagttaaatatatatacaatgtgatggttaatctttattataatcttgactggatttaatatcacctaggagacacaactctggacatatccagcagcttaactaaagagggaagacctaccctgaaggaggatattgctagtgtatagatcctggactgaatgaaaaggagcaaaagataaagcaatatgtatatgagcattcatctctttctgctctctaactctagacataatggaactagctaccacatacttctataaccacaccttccctaccatcgtgtactatatgccattcaaaccaaataagcctaaactaaatcaatttgagctgaaatagaccccctctttgcttatttttatcaggtattttgtcacaagaataagaaaaaagtgtaactaataaagaacatgggtaccaggagtgggccattgctatgataagctgattgtgtggttcttcagactctgaaactagtctgtggaaagaatgtgaaacagttttggagctgcaggcaggagaagtactggaaagtggttgagaatctgagtaagactgaattcaaaagtaatggactaacttgttaggtagaagaaatttcaaggcagaatagcatccaggatgtactatggctagtgatcaatgtcattatccaggtctatactgagataaagaaagaaattgtgtctaaagacatggaaaatgtacactgagataaagaaaggaatgtgggagaaattaaagttgtgtacaaggatgatggggaagcaaccgtaattgttaaacaacatcataaaaatatatacctagtgttcttcattaagacaatatgaaacatactctgaaaataggactgcacttgtcaaaggctccaacttgtgaagatgcacaattgtttgaaaagagagagctttaattgagaatgccacaaaatgggttctctggtggaaacaataggaaagttttttctactgttcaagtttgaattgtagtccaaggcaacatgctataacattctacattttgagctggcagcagatcttagcaacacagtccacatgatacttattttgcatggatgaaagatatcagaatgaatggaccatggaaacttacaccaagattccagaaatccaataaggcaacaaatgtgacaggtcacattctgtgcaagaatatcctgacattacattgcataaagctgagaaggtgaaactgaagttttagggaagatccctgggtattgaatgtgctaatattgtggggatatctactaaggaattcaggcaaagagtggatctggctggagaaatagtacatgtgtgggacaggcatcagagtaggactgctcaaggctagtagaacccagatgacttcttcatgagctccagatgccagacactgaactaaagtgttttgtgttgttctgctgggctttggccctgctttgacagtgtcattccttcctacccttctattgctccattttggagtaagactgtttagtttctactttatatattgaaagtatgtatatcttgctttcaaaaacaaaaacagggacttacgtggggtgctggtggctcacacctttaatcccagtactccagaggcagaggaaggcagacctctgagtttgaggccagcctggtctacagagtgagttccaggacaggctccaaaacaatgcagagaaaccctgtctcgaaaaaaaaaaatcagaaacaaaaaacagggactcaaagttgtgatgtagcctctgaaattcagaagagatgttcaacttgtgtatggtattaagactattaaatactatagggaattttagagatgaactaaatgcattttgatttatgaagtaaaaataagactttaggagtaggaatggaatgttattatataaactgatatgtttgggtgtcaagctgacaaggctaatcttcattgtcaaattaactgaatttataatcaccataataacacagccctggctatgcccagcagagtctctccagaaaggtttaactgaagagggatgacccatcctgaatgctggcagcactattccatatggtaaagttccagccagaataaaagggagaaaagaagctgaattccagcattcatctcactccacttggtaattttgggaatatttgtcatagcaacaggagcaacagataatatatgaaagattttttaaagaattaatgtcaaggcaagtaaagtagttcactaatttgtatttatatcttcaaatgacatattttgtaaactcaatatatccaaacattgggggaggagatgattcagtcaataagctgcttgctatgaaagcatgaggacatgacttcaatctccagcaaccatgggtgttggggtgtgcagctgtaattccagctctggagaagcagagacagttgggttctagtgcttgcttataagccagtatagcagaactggaaaactccagttttgctgaggaactctgcctcaaaaactttgccagaatgatattgaagaagatacttgatgccaactactggcctccacatgcacacacatgcaaacataattgtacacacccaaatataaacacacacacacacacacacacacacacacacacacacacacacacacacacacacaccacacacaaaaatccctggtggatgagcttgtaacatgatgtttcttctggcctagctaggtcccactgcccttctctgccccaaagaaacacgcatacactatattagtttaagctgttggctggtgacttgggcttcttattcttaacccataactactaatctatgtatttcctcgtggccttatcgtaccggaaaagaagctgtgcttgtctgtgttcttctgtttctaaaaatccctttttaagtttttgttaaatggaaattcgtactgcacgttgctggtgccattttgtaatgaacattcttcccaccaacctggtcccagagccatgtcagtcccaaacaaacacacaggacactatattaattatgaaactgttggccaattggcttgggcttcttattggctagctctgtcttaattatttacccgtaactactattgtaagtatttccacatgcccttctcttaccggagaaaggtccagggaccagcccattctatatggtgggatgccttgctcagccttgaaggaagggggtggtcatgcctcaactgaatatgccaggttttgttgactccccataggaggccttaccttttctgaggagtggatgggggtgggttggagggtgatggggggaaggggaggaagaaaaatagagggaactatggttggtccgtaaaatgaataaaaacaatttaattaatttcttctgtttcttaatgtggctggaacatttttagttacacatggggcttacttatattctattatggttactatagaattcaacctaactggatctagaattacctagcgacagtcctttgggcatgtctgtaagggagtttctagactgaactaactgaggtaggaaaactcccctgaatgtgggaagaactattccatgggatgaggtcttagcctgaataaaaggctgaagacagacagagcatcggcactcatctctgtcacacacatatcagtgtgaaggctgcctcaagcccctacctccatgcctttcctaccgtggtggactttaccttggacagaagccaaaacaaactctttcttctttatgttgatcttgttgggtgttttgctgaattaatgagaaaagtacctgacacatatctccacagttattggtggtgtatccaacgatcttaaataaggagttctacctgagccagcacatgtgtgggacccctacccaagtactcaacaatcacaggtataagaagacagaaattaaagattctagatgatttattttcatatttaagtagtttttcctattctaagccaaatgtctaatttaggaaggagcctctttgtgacatctccccgaaaatttacatgtgaataagataaaagcattgctagtgatcttgaaagcctttcttcattaaaagattttctagctatagtcaacatgagctttctgtaaccttctctgaaagaaaagtgctggaggtagcagaaaatacaaaagataaacaaacaaaatgcaaaccggagaagtacagcagggctttcggttacctgggaatgctttgctgattcaagtcacatgcatcaagctatgtatttaattaatgattgaggatctgcaggaaggagtcccagtgtggcctaaagagactttcatttgaaaaaaataatttcttgaaaagttcagagcttatgtttttaaaatggtctgacttgacattgacatataaattattcaagggtagtcatattcttttgtgtagtacttggggggcaggtatcataatatgtggtggtgaaaattttaaatccccaagaaacattttttcccaaagatttggatatgtaactaattaaacgcgagtggtgatggatattctgtgaaattgtaccattggaggaaatattttggaagacgaaatttcattttttgtcttttctattatttccattaatggccatcaacaatccatcaatagatgaacagataaagaaaatgttgagcatacaatggaatactattatcactgaatagaaataaatcttgggtagggatgggatacatacgtttaatctcagtacttggaaaacagaggcaggtgaattcctgtgaataagaggtcagcctggtgtacatagtgagttccaggccagccaaggctacatagaaagtgagagagagctacagctagagaaagatattaacacacattacatatctttgtgaagcttgatagcatctctgtggaacacacagacacagaaaggtaaatactatataattctccttgaatgttatagcaagctagtcaaattcaagaaacagaattggaattttacttgccagggaatacatgaggaatttcatttttacaaggttaaaactttcttgaaattggttgtacaataatgtgaattcacttacactactcatatacttggacactgttcttgtatacttgaacattgactgcacttgtatacttggacactactcttatagacttagactctgttcttgttcacttgtaaactgctcttgtttgtgttgtttgagacagactccctatgtgtagccctgcttgctctgaaacttactctgtagaccagactggacctgaactcagagattcacctgcctctccctcccaagtactgggattaaaggtgtatgccactagcacccagctacatttttaagatgttcatgtggccataatcatttgtacaggatacctctattagagagcaaagccagatacaaagagatgaagaaattattgtagaaaaatctttttgtacactgtgaagatgtatctttgtgaaggtgccttctgattcgtttagtaaagagctaaatggccaatagttaggcaagagtaggctaggtgggacttctgggcagagagaaaatgataggagataaatctaggcatgggagagacacccaagggcacagagaggaaacaggaggtgtaagatggaaaagaggtaaaaagccaggaggtaaaatgtagattcttgtcagtggtttaagttataagagctaatgggaaaagcctaagctttcataattagtaagtctctgtgttgtcttttgtgaactggcagcccaaagaaagttctgtctacaggaaatggcatgttccagtagttcatccacatcaacattagaatctctgttgtaaataggtgtaagataactgtgaattttttaagatttatttatttttactttatgcatgcatgcattttgtctgcatgtaagcctgtgcactgtatgtgtgcctggtacacacagaggccagaagaggacatcatatcttctggaactggagttacattagttctaatatgtcttaataataaaaatccagagtcagatattggaataaatgcgacgggtcagagatgtaaaggagccagccattttgctctactgaatcctcagatcaaaggggtattcctgtccctatgaatcctcagactgaatgttgtctctatgaaacatcagactgaattcatgagcccctgtctcctcctcctgccttatatttctctctagtgctgggattaaagccatgtgatcgaatgtactggatcaaaagtgtgagctctgtttctctcttacattggatcaatctcatgtaactcaccgtggccttgaactcagaaatctgcctttgcctcctaaatgctgggattaaagttgtgtaccacaactgcctggcatctatggctaactaatgtggctagttctgtactctgaacttcagaccagatttatttgttagaccacaaacaaaatattactacagcatcctacaaaccaattctaattcctttgtcctcccaatattcaaacccaatgctgacctcatgcattctccttctattctagaggaattgtgacttctcagaagatcctcaacatggcttttcttttgattagtctcttgagtacagtgtctcttagtagtgccatgtctgctcacaagtatggttgctacaacttcttagaaatttagctatcaatctgtcccatgaacaataactgaacattctgtgagctcagagttcagttcactatggcaaatctaaatcactgagacaatgaacattataaatacttactgacaggaagttttgttcaatacaaactgtcagttgcagtgacctctaacttcaatatcaaatcaggctacattcaatcgtatcagatttttctgtatcttgttttttaacgttttgtcatttagttcaactaccatgcaaaaattagcatggccccaaaaatatggggaacagtttccaatttgattccaaggtgtgtaaatttgtacagtatgtaacagatacgtgcatatcattagtaattgtagttatcgatgaataaaacatctgtagcctttttccctttcaatatgttttttttagatagttcataccactgtaaaggcataaatgtatattggcttgtttagatttaaaaattattattaggtacgataaggtaactttccaggctcccccacttcctatgaataatatgaaaatattttacctaaaagtgataaagttttggaacttctgccctaggaggtctgagagttgtcatatttaaagtgaatagagttcctgcaacgaactattatggaatgctagcttgttttgtgccagattactgatgctccaacacaccctctaacagtgatgccaaggtagaatcctattaccaaaaacaacaaaaagccgtacagtggaaaatgaaaatatatttcaaaaaacactgttaggcaattgaattcaaacagaatactgactcaattccttgtttaaattatataaagcacagtgaaaagtcaactcgcttatttctttttttttttgaaactatacactggaaattctaatcatattttcaaacaaaaagtaaatggacaaccttaagctagtttcctctcggctttgacatacctgacctaacaagccacatcaaccaccacatttgaagcagttgatgctatctgagggaaattgtttccaggttgatggtaggaacttttacaaccagctggtatcaaagaaaaagaaagtcaaatagtgattagtaagggtaaaggagaggaagaaactcctcctgtacccactggaagaagagataggaagaagacaatttaaaaacatattcaacaatagaaaaaacaatatgacaccacagggtctagggactctacacccacaagacctgaacatcccaacacagatgaagcagaagagaatgaccttaaaaacaacttcatgaaaatgatagaggccctcaaagaagatatgagaaactcccttaaagaaattgaagaaaaaacaaatgaaaaaatacaagaaatcaacaaatctcttaaagaaaaccaagaaaaaacaatcaaacagatgaaggaaacagttagagacctgaaaactgaaatcgagaaaataaagaaaacacaaactgcaggaatgctagaaatagaaaatctgggtaaacaattaggaactacacatgcaaacataaccaacagaatacaagagatggaagacagaatcacaggcattgaagatacactaagagaaatagattcttcagccaaagaaaatcttaagtctaacaaatctctactacaaaatatccagaaaatatgggacaccgtgaaaaagaacaaacctaagaataataggtataggagaaggtgaagaaacacacctcaaaggtacagaaaacatactcaacaaaatcatagaagaaaactatcccaacctaaagaaagatatcccaattaaagtaaaagaaatttacagaacaccaaatagagtggaccacaaaaaaagtccccttaccacataataatcaaaaccccaaacatacagaataaaggaagaatactaagaacatctaaggaaaaggccaagtaatatataaaggcgaacctatcagaattacacctgacttctctatagaaactctgaaagctagaaggtactggatagatattctaccaacactaagaggccatggatgccagcccagacccagcactagacccagcaaagctttcaatcactatagatggagaaaacaagacattccatgacaaacccaaatttaaacaatacatatctaccaatccagccctacagaaagttttggaaggaaaactccaacccaaggaagtcaactacaaccagaaaaacacaggcaatagataatcccactttaccaacacccaaaagaaaaaaaggatggaaacccacacataatttcaccatcaccaccaaatccaaaacaaacaagaatgaaaaatcaatggtcactaataatatccctcaatattaatggccttaactcacccataaaaagacacaggttagcagcagaatggataagaagacagaatccatccttctgctgcatacaagtaacacacctcaacttcaaagacagatggtacttaagaattaaaggttgggaaaagattttcaaatcaaatggacccaagaaacaagtgggagtagcaatcctaatatccaataaattgtactttaaactaaaatcaatcaaaagagatgaaggagatcacttcctactcatcacaggagaaatccatcaggatgaagtctcaattctgaacatttatgccccaaataaaaggcatccacatttgtaaaagatacattactaaaactcaaatcacacacacttatagtgggagacttcaacaccccactctctccactggacaggaacaccacacagaaacttaacaaagaaacaaaggaactaatagaagttttggcccaattaggcttaacagacatctatagaacattctacccaaacacaaaacaacatactttcttctcagcaccacatggaaccttctctaaaatcgaccacatacttggcaacatagcaaacctaaacaggtattaaaataaccccctgtatcttatcagaccgccatgctttaaagttagaattcaacaacaacacaaattgtagaaaacctacaaactcatggaaattgaacaatacacaattgcaccattcctgggtaagggaagaaataaaaaaagaagttaaagacttcctagaattcaatgaaaatgaagatacaacatgcccaaacttatggggcactttcagagcagtgctaacaagaaaccatagcactaagtgtacacatgaagaaactacagaacaatcacactagagaattagtagcacaattgaaagctctagaacaaaaagaagcaaactcaccccggaaggaagagtagacaccaggaaataatcaaactgagagctgaaatcaataaagtagaaactaggaaaacaatacaaagaatcaatgtaacaaagaattggttctttgagaaaactaacatgatagacaaacctttatccaaacttaccaaacagcagagagtgagcgaacatgcaaattatcaaaatcagaaataaaaaggaggacatagcaacagacactgaggaaatccagagaataatcaggtcagactttgaaaacctatactcctcaaacatcaaaaatctaaaggaaattggcaattttctggatagataatacttaccaaaattaaatcaagaacaaataagcaatataaatagacctataacccctaatgaaatagaagcagtcatcaaaagtctcccaaccaagaaaagcccagggccacatggctttcagtgctgaattccaccagttattcaaagaacatctaataccaattatcctcaaagtattccatacaatagaagcagaagggtcattgccaaactcttcttatgaggtttcactaacctttgtacccaagccacacaaagacacaactaagaaagagaactacagaccaatatgcctcatgaacattgatgcaaaaatactcaatgaaatactggcaaatagaatccaataaaacatcagaaaatttatcgaccatgatcaagtaggcttcataccagagatgcagggatggttcaacatatgaaaatccatcaatgtaatccaccatataaacaaactgaaaaagaaaaaccacatgactatctcactagatgccaaaaaaacctttgataaaatccaacaccccttcatgataaaggtcttggagagatcagggataacaggaacatacctcaacataataaaagcaacagacagtaaaccaacagccaacatcaaactaaatggagagaaactcaaagcgattcctctaaaatcaagaacaagacaaggctgtcaattctctcaattccttttcaatattgtactagaagttctagctagagcaataagacaacaaaggagatcaaggcgattcaaattggaaaggaagaagtcaaactttcactatttgcagatgatatgatagtctacataagtgacccgaaaaactgccagagaactcctacagctgataaacaccttcagcaaagtggcaggacacaagattaactcaaaataatcagtagctctgcaatatacagaagataaatgggctgagaaagatatcagagaaatgtcaccctttacaatagccacaaacaacataaaatactttggggtaacactaaccaaacaagtgaaagacctgtatagcaagaactttgagtctttaaagaaagaaattaaagaagatactagaaagtggaaagatctcccatgctcttggatagttaggatcaacatagtaaaaatggcaatcttgccaaaagcaatctacagattcaatgcaatccccatcaatattcttgcataattcttcacagaccttcaaaaaacaagtctcaactttatatggaaaaacaaaagacccaggatagccaaaacaaccttgtacaataaagaaacatctggaggcatcaccatctctaacttcaagctctattatagagctatagtcctgaaaacagcttggtattggcacaaaaatagaagaccaatggaatcgaattgaaaaaccctgacttttgacaaagaagctaaaactatacaatggaaaaaagaaagcatcttcaacaaatggtgcaggcataactggatactggcttgtagaaaactgcagatagatccatgtctatcaccatgcacaaaatttaagtccaaatggatcaaagacctcaacataaattcagccactctgaacctcttagaagagaaagtagatggtacccttgaacaaattggtataggagactgctttctgaacataacaccagtagcacagacactgagatcgataattaataaatggggcctcctgaaactgagaagcttctgtaaggcaaaggacacagtcagcaagacaaaacagcagcccacagaatgggaaaagatattcaccaaccccacatctaacagagggctgatctccaaaatataccaagaactcaagaacctagtcaccaaaacaccaaataatcaaattaaaaagtggagcacagaactaaatagagaattctcaatagaggaatctaaaatgcctgaaagacacataagaatgttcaatgtccttagccatcagggaaatgcaaatcaaaacaactctgggataccatcttactcctgtcagaatggctaaaataaaaaacaccaatgacagtttatgctggagaggatgtagagaaaggggaacactcctccactgctgggaggagtgccaactcttacagccactttggaaatcagtatgatgattcctcaggaaaactggaatcagtctaccacaagatccagaaattccactcttaggcatatacccaaatatgcacattcatacaacaaggacatctgttcaaccatgttcataacagcattatttgtaatagccagaacctggaagaaacctaggtgccccccaactgaataatagatggagaaaatgtggtacccagtggaatactactcagtggggaaaaaaataactatggaatcttgaaatttgcaggtaaattgatggaactagaagaaaccatcctgagtgaggtaacccagtcacaaaaagacaaacatggtatgtactcactcatatatggattgtaaacatagagcaaaggactaccagcctacaatgcacaccaccagagaatctaggaaacaaggaggaccctaagagagacatacatggtcccatggagaatgggaaaggaacaagatctcctgagctgattggaagcatgaggagagaggagagggagttaggagaaagagaaggggagaagaggaggggagaggaggacatgagagaacaggaaaatcaagtcatgggaagaatagaggagagcaagaaaagagatacaatcatagagggagccattataggtttaaagagaaatctgccactagggaaatgtccagagatctacaaggttgaccccaactaacaatctaagcaatagtcgagaggctacctcaaatgcttttccccgataatgagatggatgactaggttatatgccatcctagagccatcctccagtgacgcagaagcaggcacccacagctatactgagctgaactctggaatccagttgcagagagggaggagtgatgagcaaaggggtcaagaaagaccaggctggagaaacccacagaaacagctgacctgaacaaggtggagctcatggactccagactgctagctgggaaaacagcataggactgttcctgaccccctgaacaaggatgtcagtttggaggtctgatagtgtatcagtatttatccctagtacacaaatggactttgggagcccattcctcataaagggacactctctcagcctagaatcatgggagaggtcctaggccctgcttcaaatgatatgacagactttgaagatcccccatgcaaggtctcatcctccctggggagcagaaaggggatgggatagggagctgttggggggggggctgtggaggaggggagggagagggaagtgggatttacatataaaacaagcttgtttctaatttaaatttaataggggggaaggaaagaacatagagggaagctgaataacaagtatggggaaagagttaactatggagaatacattctggaactctacactacaagagaatagttcacaacaacatactttgtgttttatgaagaactggaagagatgagttcaaaagttctacaaaaataattaataaaataacaagaacaaaaaaaagaattctttagggagatggaaataataactagttgccctgatttgatcagcattccttttgtgtgtgtatactgagttatcacatgatctccataagtagctacaattattacatgctgtttcaaaagcaaactaattagaaagtggtttttccatatgtcatgaatttggttttcctgatcccaagtaaaatgacattgtcaagtttaaacctatggagaagagttgtgtgtgggtttcatgtattaccacaatcaataaaggtatgtggttttggtctttctgtataatcttattaagccttctcttgctcataacacagactgcagtgtttgaagtgcccctaaggtgctcggaatttcactgcagtggttgtctttctgtccagattggatgcagtgcacaagctgtagtaaagactagtcatttctcaccacacaggctttgtttttatagttcagcttgatttatgtcttttttttccctagaaacccgtcaaatacattgaaaagagtagagtaatatattttgttaaaaaattgcaatgaatcatgtgtggtcttccatgaaatgatttcattaacaaaactgattcttttatatctacatggtcagcaacagtagctgaaatatggggcaacttttgaggatgtttcttaattatcttcatccataattaactaatgaccaacagataaatcagaatgtatcctagatgctcctttgcctctatccagtcttcattataccctaagagactttccttgttaaaagccatgtggcgggaacagatggcctgcatgtgttatcttcatctctattggcattgaggacacttctgttgggtgacttgacagtagacgcatcttcgggagtctctcctctacagccatctggcactgaattttcaactgcagcccatggggtttgaggaatgtctcaacatgaagggagtaataagtctctggccactaaagtaagtggccagaaacttctttgcctactaatatatgcagatataatcttggaaaggctgctgtcttaatagtcaatgatcatgagactaacctggaagcttgctttatgttgtataagtgatccaaaagacttatatactgttttaatccttgtatttagcagtaaggcttgagtaagtcacaaatatatttcttctcatttccagtgtagaaaatgggaataatattatgaccttaatcacagagtacagtagtaaatttgaaactgatgttctaattagtaacaacaattacataatggaaaaatctgtggaataactttgaattatggtttcagagacctatggttttgccatttttattgtataatctgtaaacatactatggcagagacatacaggtacttgtttttgcctttccatggtattagaattgattgaataaagataaattcacaagatgatgacaattttattggtaacaatttgagaagtcactctgattctcttgatacccagcagaggcaaacatgggctctttttctccaattattaactacttgaagatcaatcattacacaccacacagtaaatttatagatttgtgtgaatatacatatagtgtctacaaagacttaaaaagaccacacagagttcaaagaggcctaacagagaggcagaatatctctggggataaactaatgaactcacctgttagagttactgctgcagactcaagcctgaggtatgaggtttgcgagaaacctcaaggtggagtccagctgaagtgaggtgaggaactatgtcagcttcagaagtaaagggccagaccaggcccagacagacaaattcactgaagaatggatagcaggtccagttggacttacagacagaaagagttagcaattctagcaggtcccatcaatgacaggaacctaactgaagtccctgagacagtccagagttctctgtctgtttgcctgttgacacacactctgaattatcaggtgagtcagtggaaccatgactatctcagtgtcaaagtgtcctttttatggggtccatgttacaccctttccatctggtgtgttaaataaattcttggaatttgtttttctgacatgatattaatatgcctttggtgctcatatggtgccaatttactctgataaatgtgtggggtagtaccctttctacatttggagtaagttatttatcagtctgggcttcatggactggattgaaagtgtttgcatgcccacaaaggaaaagaatcatcatattatgttcttgctttcatgatggagtcaaaagctgtttgtgaagtagaatctctcaaggcaggtcacagcctgaaaggcactgttctacacaacatgcagtaacagagcagggcgcagccagatctcaacagagagtacacaggtataaagtacttctggcaaaggttttgtttaatgcttccttaacccaaatggttaatttagattatcagcttgaaagccccaaaactgtgagccaaaactaattcttctatctttggttgtctcctgtatttagacacagaaacatagttaacaaataccctcatccttcacaaggtacactttagtacctgcagtgtataacaaaaacctagggttgattactacaaatactctaaaatttgtgtatgatttcagtaacaacattaccataatactaaaaagatatgtttttgttgttgaagttaaaaaaaaatctcaattcaaattctgattttcagatacatcattttatctcaggttccttaattttacttcctagattttctttttccttagttgattttagtttggttttataaacagacattctgaaattcttgatagcaacttaaagcaagccggttggggggacaagagtggggggcagtatccttgatacttagcaactagcgacttcctgtcaccggctatcccgcagtagatagttgctaaaacatttcaggagaaagtatctaattgtagtgtgggttcccaggccagatgagagacatagagttttacccatacaccagacatctattagagcatggtgacctttccctacccaaatcaggcttgagcctactcagctccatagagacaaggactacatcatgataaaatcagttaagcttttgtccttctgttccctccctcttccacccttcaccccaaaggaatggaattctcagaaatcatgtgatctgtagtcggctaatcttactgttagctcctgctgactcatatataagcaagccctgacatttccatgaaccagctgtccccccaaaagagcctcctggtcattcatacccacaatactcagggccacctgagatcctgctccccagctcctccatcctgggactgccagtgtgcaatggatgggggtcggggtcgtggtggttggggagaatccacattgctgttgtttgtttgcttgtttaattgccccagtgaagcttgcttcagatgccacagctggccattctgctcccatcagagtattgaggacaagggtttttcttacttctcagttaattcaattcatttgtgtcacattcttcccccattgctgagactgctctctgccagaccagtgcaaagacactggtaaggactggtgtcccacaggggaatgaaatgaaggtgtttctgtaatcttgtggtaaacttggtccgcttcatactgatgacttgtctgtcttggtgcctgctcttttgttgttcactttacttttaaaacttcaactgtcaagaatttaacagcacttttattgaccaagtgctaactaattatttaacacaagccttccacacaaagaagcataggtttccaggtttgctctggtcactgatttgccttagctagcttgcagctctgttagctttgatttactgtgacaaattcccagagagaaataacaaggaggaaatgccatttgggtccttgacttcagaagttttcacctatggctgtttggacagattattttggggcccaggaaaggtaccatcaccatggcataagcaggctgctcttgcatagcatccaggacgcagagggagcaggaggtactagtgtccacttaaatttttccagtgcacattcccaatgacacactttctcagtggccaacttccccttaccaggcctcatctcctcacatctctagttccttccaatagtgctgccacctgggaatgaaacattcatgaactttcagagagcattgcagatccaaagtttgcagtattacctcattttgacactggcaggccagtattccaagcccctcattgcaaacaaactaggatagttgttcattttagcattaatgaacaatgagattcatgtggcctaaattctctctctttgggaccatagctttctctgaagccatgcttgtggcttgaggtcactttgcaagtatggcactgacataggaaacactctctcattcataattcctagtatcctatttttatcccttttatttaactttatgaattaatatacttttaactaaacagtaacttcaagaaaaataatgctacccaaatattagtggtagacttatcttatactagagttctggggtattattttcttctttcataaatcatactacacatagattataacaatcacaatcttagccaggtgtggtgacaaatacctttaatcccagcacttgggaggaagagacaggtatatctctgtgagtttgagaccagcctggtctacatagtgagttccaggacaggtatagtcacacagtaaaattctgtcttaaagagagaaagaaaggaaggaaggaaggaaggaaggaaggaaggaaggaaggaaggaataaaagaaggaagaaaggaaaagggaaggaagaaaaaagaaagaaaaaaagaaagttgctgaacttggttgtttttattcctttgtctctttgggggcccgacacccagctcccaaataaatatagaatcttattctttcttatgaatgcccagccttagcttgacttatttctagccagcttttcttaaattattctgtccaccttttgcctctgagcttttatctttatcctctataccttgttttacttcttactccatggcttgccatgtatctgggtagctgacccctagaatcctcactcactcctagatctccttctctgcagacttctcctatttattctctctgattggcagccccacctatcctttctcctgccttgctattggtcgatagctctttattaaaccaatcagatgttttagacaggcaaagtaacacagcttcccagagttaaacaaatgcaacataaaaggatgcaatacatctttgcactatgaaacaaattttctacagcataaaaaatgtaacacatcttaaaataatattcacactcttacaaaataaatttaaaattagatttcaaataatttcagtttaaaaagtcatatttaccaaaaaaaaaaaaaaaccttaatggaatctcaccaattctactgaaggctgctcatgagaacacataaagaaaattgccttcatcgtctatccaaaaagacagcatgacaaaaagaaagacactggttagggtctgaaaagtagagatggggacttgtgcagtgtcgccatgtggtaattgataaatcttgctgaagaatgaatgaggtgtaagacaagcataaaaagaacaaagtgctgggaaatgctttaaaatacagtcagcttagggccttaagattgcaagtcatgagccctggagaggtgagtgagtagttaaaagcactggctgctcttccaaatgacctcggtttgattcctatcaccaacatggaggcttacaaccatcaataactccagttctaggggatctgatgccctcttctgacctctgtaggcaccaaccatttatgtcatgcacagacatacatgcagacaaaacattcatgtacataaaataaggataattcttaaaaagaatttgagttagggtggactaaagaaggatggcattctttaattgcagaacagtgaaagggttcaattagccaaagttcctacaggaaatagtgagttgtaaaatgcttttttactgggattcagaatggtatttgacatttggcctgtagtcttggtaaaacaaaagaggacagtgagttaatatcaggagaacccagtgtgagcttcattgctttcaagtttgtctctctctttttatctctgctatagatgagtaaagcagtgatagggaaggtccttctgtatatgtttattttattggttgttgaataaagtactctaggccaatagggaagcaagataggaggactagaagtcgaggaggatcctgggaaatgtagtaaagagaagtcttgtgatccaggaaggaagtgacatagcaggcagactcagaatagaagcagggacaagcaggaaatcgctctcttcctcctcctctcttctcggtggagctgccatgtgatcccggaaagaggatgttccagaacaacatgaaaggctacagagaaatcatcttgcttaggtaaatgctgtggtttggatgcaatatgcctgccacaggcccatatgttgaatgtttggctcccacctggggttgtatcctatgctgttctgaaaatgtgaggaggtggggccactttggaagaggtaagtcactgggcaggctttgggtgttctacctagtccctgggtgcagaaacagtgtgtgtcaatggggaggtaaaaggatggaaagtggaagtgaaggtagccatgaggtaacttgtctccaccatgtgttcttgacaacacgtgtggtaccacaggtcagaatcaaaagaagtaccatctaaggatgaagcctttgaaactgtgagctgatacaaacctttcactcagtcatgtatttttcacaattctgaaggaattgccacaaagagcactgttgcaacctctgtctattgtgatcggaggccacaagaaactcatcaaggcctccctagtggagtaaatacctaagtcagggttctgattttgaccttttcccctgatatcaaatgtttctgaaaaataaatttaatatctcaattaatcactgatctatatgcatgaatacatttatatgttctaaaagtaaatgataccgttataaagaatttgagctacaaaggtaaatgaagccaaggacaataatagcaggaaggccctttaggaaaaaaaaatacattaccagtaactcagcatcctatgatcaatgttaagttttctttttagagcaaagttaagcctgtgctgagtaaatctccattcttcaaagtgcagaatgggtgtgtttcagagggatggatgaatgagttggaagcagagatgaagacaatcataactacaaacccacatacattatgaaaatgtctccattgctttttattaacaaagcaaagcctccaacaggagaaacaccatataaattgtattgtttaaaaattgctgtattcattatgaggagcttaattatggtcatcatttaccaaaaaaaaatatcaaagtgttgtcagagaattcataataatgaatgtttctcattaaaacttaatgaacaagtggcttatattgaaagaagtctttgaaatatcctaattttcctttctcgttcaaaagaattaatatttatgcaaattagatccaaattaccacagtttagatggctacttagtactacaaattatagatctgttcaataccacagaagccaattgtatttgtcagcatggctagattgtgttgtgatgaacaaacattgagatttcatggcttctttttcgatatagagtcatcttcagagctgttctgcccccacatgtgactcagaaagcactgtgtcttccattttaagcttctgccaacactactcatggcagcaccattgcacagaaatgatataatattgtgtattagctttcaaaagtttctccctaaagtgatacacataagtactcatagcacagggccatatagtctgactaacatgttgtaggatatttgatcacactgtgaacctcaaaatttcattaaatagaaatctgaggtcaggaggcagagtcagcagctagttgacagaagtagccatagaaggtaaaggaggagtcaggaaaatggatagagaaacacacaggaagtagaagggagggacttagaatttggtggttccttttggataggaacagccacaaaagatctctctttttgagatgccagctaagaaggaaggtcagctagatgttcctcaacctctctgagctagcaggttttcaccccagcctctgactcccaaaactttattggtaaaatcataagatataaatttagaaaaaataaaaaacaacactaacagagtgaggaatcagatgtgtgtatactctgtgactaatcagctgtctacaacagcaataccaaagtcaaaaaaggatattggtaaaacaatattgtgtacctatttgtaagtacctctaggattctttgcatagtatgaggagagagagtggagtctttcaaaaaccagctccaataacactatatcttgaactaatacagagtttcatcagtccaaaagttaataaattgattgccaatgtatctatatgagtataagaaaaccacacaaaaaaatctcaaatagtctgagagggattgaaataccaatgcccaagacatctctctagagaatggagagttgttcccttgagtatgggattatatacatcacagacaaagctcctttcttcagctggatgtattattccattaacacataaggaatctcagccatactaataaggaagggaagactgtgactagagaggaaaggctttcccttctggagtcctgtctgagaatgtacacaggcattacttacttcttcatccctaggctaaaacagtaactaaacgaagagttgagttaattaaatgtgtttttaactacattaccttttggctgaggccagtgtgatatagttaatgcaagtgctgaccatttcctacaataggtgacttcaaggacatacctatagtggtcatttatatagctgaaaatgactgtgttcacagataggttggtggacagcatgatggtacaagtgagctttgtactggctgtaatgatttagtcactggatttgtttgcttatatttagccctgaaatccatgattcctcccaataaagactggaaggtttttcatattgatgaatatgggtgaatcctaataatgttgtagattctggcctgatttcactagaggctacaagaaacagacatactagaacacaatcaggtgatgagttctgtacatgagagccacttattcaccccagtataggtcccttaggatcagaagattactcgataatttaatagttaacataaaaatatgctaccaccaagcacttctagttttaatccagggtttagttaccagaattcatattttgcatatatactccaatcatctaatctgatgacaagaaatacaattgtccatcatgctctacaccagtggttctcaactttcctaatgctgtgatcttttaatacagttcctaatgttgtggtgaccaccaaccataacattatttagttgttacctattaactataattttgctactttaagaatcataatgtaaatgtctgctatgcaggatatctgataaacatcccagcaaaggggtcttgacccacaggttctgcattataacatgagctcctgtctcaatgctttgacaaaactgaagcctgcttacctttccttgatcagatgtagtaaagaaaaattttaatgtaaacctgcaagtggctctgaattttttacctttgatgcgccaaaaagcaataagtagttctgtgtggcaaacataaggattattattatttacatttaagctcacagactacatgaagacatgttgatcaacaacaccatgttttcacagcagtttatacataatactataaccaacatagtttgtatatgtacactctgtgaagttcacatgatgataaaaccaccaaaagatgcatttttcacttttataccatacttaagtggtgcataactatacttacaagattgtcagtgatgagaaagctggccagtcctatgttggcaactaccagtcaggaagcccaaaactgaaccagcagaggtctctgttaggctctctacagtgcagtggttatggcctcctagaagtcctctctggctcagtgtagcctgcttcctgaaagcatatttccatctaaagtttttaagtatacaaaaaggaattctggcaccagttgttgttaagttctggtttagaagtccaccttcagaacatagcttttgtttagataactcagcaagttccatggcccacatgttcctctgatagacagatattagttccatggcccacatgtccctctgatagagagatattagttccaaggcccacatgttcaactgatagagatgttactccttgtgtcatctccctgaattaaatatcagtgtgcagctttccttctacaaggaaactggaatgaacatgctcacctccttctcatatcaggggatacctgctttgctatctaaactttttcaccagcccatatttatggtccttatgaataagagagagctttatttactcattatttgtttatttctgttaaacaatacattcaagtaggtcatcaaaactgaaaaatccttgaagatgaaacctgtcacaacagaaagaaggagagttttagatgtgttctccaaagcaaaacacactcactaccaattcatctttgtttgatgtatgtaagtggctttgcaacccagggaagcagtgccttcaggcatatgcccataagtcagtgggggaactttatatttaaaggctgaagagtaaaagttcacttctagtctcaggaaccaccctccaaaggacaaaaaagcattctggacatcaggacatctgtgactaccacttcttctttatactctgtatgtgatccttgtctatataacttcttctatcctgttaagttctctgtgacatgaagataatgggatttgctccactcgatagtcccaaggattaatgaagataaaacacatgtaaagccctcctggatcataccatacttttgattccttcattcctacatttttacttcttgaagtaatgatcaggaagtccaagaatgtggttttcattttaaaaggaattaagtatgaattaagtattaagctgaaaaattaagaatgttgatttctgtaataagtcagaaatttttatttacagaactctattaacacccccttcctatcttcaaacacaggacatgtatcttgatatgtctatgccattagattgttcatgtgttctttggtatgaaactattattctgtatctcctaccaaattatggtaaaaagcttttctaccaacaaatataaactattagaagcaaagtccagataatcttcccaacaatccatatattcatcattggttgattgtcatgttcactgacagcctgctccatggatgccttctgtggatagaaaaaaaaggctctcatgacattgtctccattgttacactctattctgcaaggattacttctgaatggatatctctaaagctaaccgataatttgaacattaggtaaaatttaaagcctaaaacagaatccaagtatgaggagtctctctgttgatgatagaaacagcagtggaattccacaatagaaactggtgtaacaagtagacttcattgataaaagaaagcacagaagggcagatgaaagaggaagacggggtgaagttcttccctacttcactgcaaaaaaaaaaaaaaaaaaaaaaaagttcacaggagttgtgtgttaaaatacaggtatgcattaaagaggcaaatccaacatacttctgtgatcttcgtgcatatcaaagaggggaaagattaactgtggtatgcacctatttgaaaccagtccaatccagtatgtaagcagcctccatagatttgcctcaggacctttgtgatcattagtcagtgttccagaatgttcttcccttctccagttcttttgtttcctctcatgtggaatacacttagtctataacagaggacttttgacttttgagtcagtatctctcttctgttaatataaaaaccaatattctcaatccatactgatattctaaaggaaggagggctgaagccatttaacttgcccttccactgccttctcaattcaccaggatgggcgacaaaatcttgcctgagctgagtttgtttgtccggagagtttcatatagtccagtctgagttttatatagtccaggcaaacctcaaactcactaagtatccaagggtaaacttaaatttctgatcattcttccacaacttaagacttaggaattcaaggtacactataacatccatcatattcttccattttatgacatgaatccatcctccctattttccagagacgtgtgtttttgatatatagtggaagagaattatttacctatcaaggaatataaattaacaaatcattcaaaaatatcacgtcgatttccaaactatgaaaacaaagcagaaattttccatgtgggacttctgagttcttctgaactttcctttttatcactacagagggatctatgtgaagtattcaccttgttcatgttgcatatcattagcctacacataaaaatactgttttcactgtgttatgtctttgattctgcactaatagatatgaacaagtccatgcaaatcaaagcattcccttttcttcatcaatgatgagacagccatgcaaaatttattcctgaaataatcagaataatatctaccactaagtccatttcagaataaaatttctcccaacatccaataggaacaatacataaactgcccagggtccaactgaagccactcagagagaagcaacatttttctgaaagatggtatccaaaactgagaaacgttaggagaagtgtgactcttgagagttcctgttttagatcagtaattgccctgctcaatgaggtgatcatggagattcaatgaacctccatggaaggctttctcaagaaaatgaggcaaagtgatcttatcctgaattgccctttactgtcaataacttcattactgcaacagtgtagatacccagtgggctcctacctgtcaaaggattgcattcttaactgctttccctgatcttttccttgcccctgatttgactgtgtgaagaataaagacaaggttcatgtttttcattacattctcctttcccaccctctgtcccagtccagttctactacagattatgtctgtgggagatgagcaagttaagaaaatatgcttcttttagatgtctttgggccttggatatttgccaaatacatttctatatcatggtcactgagcctgaaactgagaaatcttcagagagcttgtgaatcagcctgttggaaaaaaatctaggacatttgtgaaatgtgtcttttctggcaaagcaagtatgaatatttctacatttgtgaccatcgcctatttaaggatgtcatgatcatgccaagctaggaacttgctatggtggagcaaaagctgtcaagaaatatgtgattttcaaagacagggcatctggaaaggtctagaatgccatgcatgacaccttcaaactggaaggaaaatcaaatgcaagatactattaacacatctttgaactgtcaacacatctagtaacagtagtaatactaaaagagataaatttttccagttatttttatggatactccagacaatagtattgtaaatttttttgtttagattttatttgtttatttgtatacaacattctgcttccatgtatatctgcacaccagaagagggcaccagatctcataagggatggttgtgagccaccatgtggttgctgggaattgaactcaagacctctggaagagcagtcagtgctcttaaccgctgagccatctctccagccccctaaacttatttttaatgtatggtcatgtgtacctatttaaaacatgagaaaaacatagaaaactcccaaagtgtttttctctattgggtgagatcttatatcatctttttttttctctttgatttttcagagatccacttatatcctatgttgaaacaaaacttcaaggccaacaggatctatatgtatactcctattataaagaatgttattagataaattatgccataaacacacttttctacttagaatagtggctgtgcagtccatgctttgaatgtaaacatcatattttaagaatttagggagaaaataaaaaaaagattacaaacaccagagtgtccaaatgcctgtctcctgtgacagtcacctcctctgtatagtcattttccccatagacatagatcctgggaaaagagaggatgtgacggagtgacttcttcatcttcctgttgttttattttcgtttatattatttttgtttgtctttttgtttagtttttctttaaactatccagagctttctagaaacacagctaaacctccacaaaaatgtttaactgaccaattatatggagggtgttagaggtcaccagaaagagtgatgcacacacacacatcactgttatatttttaaatataacagtgactttaattcatgagggacgaaaaatgaattattgattggaattatggaaataccagaaaagaatatatcagtgctatctatagccagttctgggagaactgtcagggagattactgttaccttctgcaaccaagttcctccatagtaacctagattaaattgtgcaatctagtgctttgggaggagcctgatcatgaaattgaatgtgtccagtgatttttttccaatataatatttgtgttgattattgggaatttcatatcataaaccccaaatgcattcacttcccagtcctcccacgtcaacccctacccttgtgaccactcccaaaaacagaagaaagaaaaaattttaaaaaacaagttcaatttgtgttgcccatatactcagtggagcatggtcaaactcccagtggccgtcaccttaaggaaaactgagctattctcctcctgcaccccccaccagaagccatcaattgtggagagctacacttcagcatccttatcacaatttttaagagttttcttcaacggctttctgtctagactgttcctttacttttgagagggataggggttgtcaccaaagtcttctatgtccctctgtttcaactttgaatctgcagtcatggataccacagcaaaattatcttccttccctttccagacagtggccacatgaatcatggacttctatgtagtttctagtgacagcatagaccatggacattcacatggtctgtctccagcatcaacacatgccacagacctcaggatggtctctggtggcagtacccaccacagacatcaacatgatcctctgctgcagcacaggccacggacatcctcatggccctcagtggcagcacaagccaaggacatcaacatgacttctagggccgaacgggtccctgacaccaatatggtcccaggcagcagcccagcccatggatatcaatatggcttcaggtggcagcacagaccatggacctccacatgcccttaggtggtaacatgggccatggtatccagtgatttttatatgttaaggacctcttacagattgtttttctctagcaaagtttctgcagccttataaaaactgatcatatgttcacagtgtacatagcaaactcctgagatgaaagtccaatgctgcctgagatccagttcctttctttgtgaggaagaccacatgttcctataaactttaaggacagaatatagttttagtagtatctactctttgtgggctatttttaatacttaggtgcacagtatgacccacccatgtttgtggaacattgaaaggttgttgaaggaaaacagtaaaagtgtgcaggaatgcaaactgctctagcagctttactggcatttgtttcttttgctttcacaaatgactcataggtctttgtgaagaaagggttttcattctattggactggtatggataggtgagtccctagaccctcccccaaataactgctgtgtagtagaggacagtccctgtacagagagccatgtctgaattataaaactgtcacagagctcttggttggaaagacagtgtcaccaactatttcagtacatttttaataaaagattctcctaccctgatcaatccatgctcttcaatttagagctgagattaattttccaagacatactgtggtacagtattaacacttgaagtcatcttataaccacttgcttttgtatattgcaccaccttggaagctgcttctgttgacctttagattaaaaatatgttggattatcatgattgacacttttaaaatgactcattcttgccaaacatagcataacaactttttaacattcccttttctttacaactgcctccactttcattatgtgaatatggctgtattatatgctacctctccttgcctaacatgctttctttctttctttcttttttttaaaacagagttcaagaagatttacatttggagttaaatgtttcagtgattgctctgttggatttcattatgccagtatagttaatcaaagcaagtctggccttgctaccatgattcattgcatggtttttgaacttaatcatttacagagaatgaatatacacattatcaccagggctggatttcttcaacagcctgagtgacatggtactgtaaagcctttgtcaactgctgcttccaagaactccacagttgctagcatttgatcaaatatttcattgatgagattttggttacaaagaggcaaataggaaaccccgaactggagctgtagagtgcaggaaacattgaccgacctcttattgtgaggctaggctgatggtgtcctttgatttgtatagagtacttcttttcagtgtgtgtggtctttgcactcataattgacaagaaacctttcttcactctcattcctaatcccatcataaattattggctcttggcatctgggcaggcttgggttcagcagaccttgggttttaggacagcctgggggaatttcggggattgttgtttttaaactgaagaagctaattgtgtaagtattaacatatgtgagtcaggcctaacaggccttgttcctgagcagccaacaatgatgcccctgctaactcaagattccttgggaaggggtgagggagggagagagagagagagcagaaaagagaaaaatgcattttcacattcagctggaactggtgcacatgggagcctgttctgggttcatggatggagttgttggttttcagggttcttactagctggttgttaaaatttttatcacttaaaaatcaaaatatgtaaacttttaattaagttatacttctttaaaggtagttagtactcaaactcaccacttgctaaatactgcaacatctgtgctactgaagtcactgtggcttcctggaataccgcagaatggcatgctatgtgcatcgcttctgagctgtatgctcactaatgtcctgttggtaacctaagatcagccatgatggctttaccttctagagagcacaagttttaccacccagatgtaagtggtcatatgtggccactacagttggcccttcgtggtgagcatatcacattcacagacacaaccaaccatgcactacacagctattcccagagtgtgtgtacctgtattcatttcatactgtttctgttcctgtcatcacccctgacaatacagctcctacatagcatttgcattgcgttaggtatgaggagtaacctagaaataatttaaagtctgcaagagggtgtgcattgacttgtgtgtatcatctgccatttccacaagagactggaacatctgtggatatgagtatctgtaggccgtgcaagaggcaatcaatcccctatagacactaaaggacaactgtattattttatttgctggccagaactctcagcctcagaaatatggggaataacttggccagtttagttttctgactccaaagtctattcttttaagctagggttttataattattttttagtggcctttcttgccatggtgtcacatacacacacaaacaatacttaatggcaataactagcatttgtttcatgtgcccactgttaaataatctacaacataagtacatagaactccatactttcccaaggagtcagttatgtccttaaattgcacatattatagttgaagtttcagttgagacaaatctagccccagcaacgatcagctccattgcagcacagctactgtggtttccttataccagctgtcaacttccatcctcacccccagacacacagaaaggatctccttgggggatattttcattaaaacaaccccataactacaatcaccaagtgtcaaatctctcaatattttttaactatttttcatgtcaccagcttttgctttctgacctctccccaccctaccccctggccccaatgctcacttggtcttcaaagcatgtatcatgaaggctccatagtcaggatgtgaaggagtggcaatttcataggtgtgcaagatgcaccagcctaggtggccagtcaccaagattttacagagcactggatcctgaactcactgtactatcttctttctatgccctgtagattggccttccgtgtgtgtgtgtgtgtgtgtgtgtgtgtgtgtgtgtgtgtgtgtgtaaaactgaaggcaatttttcaaccaaatactatattattgatgttggattcaggtaatatgtgatttagtatctgggaaacagaaactatcagcctgataaaactgtacctggctgtttcaagtatctttgtaaggatagtagaaaaactgaagagtaaagtcactggggctatgcatgtctctctatgtgtctctgtctgtctcttatataataaaccaaaagcctgacttcctgaaatatctcaaactttttgttcattattgttaccatctacaccaagaaataccttcagctttacctctggtcctggtggtcattgctttcttacaagtttatctgccatggtatgaagactgcttctacagaactattagtcacagcaagtactttactcttgtgttccttcatcaacaccccagcctgctgggcagcttcttgtggaaaaacactacccagtttctactcactcctgcattagagatcgtttggcatattgcagttaaatacaaatcatactctttccaagaaccttgttataaaaaagaatgaaataacaaaacaaacaacaaacaaaatgagcaaagctctgtgagcacatctctctatgcaaaagtgatatcaaggaaagatcaattcacttaattataaaattcccaaaagaactgaagacagctgattgcaaagttttgttaattattaggattctctttttaccctctctccgtagttgtccattcatgtatgcattttcttcctcagttaaatacagaataaagtgttgtggacatagtagttatgggaaaacactacctcatctgctggcgctaaaatctgtgcaactctacaaactgacccacttaacaactgcttcaaccaaaatgattgccctattaacatagaaatgcaaagttagagctcacaggtatagcagtagaaatctcacctaatatgtcaagattctgcttgggtgaagggaaactaggaatacaggaaactaagaataatccagttcacctaccttgggttgaactgaattttttttaattgtggttttatatgctgtaaacttttatgattaaaagcaataataataatagccaggtagcggtggtacacgcctttaatccagcactcacttgcacggcagaagcaggtggatctctaagtttgaggctagcctggtctacagagtgagttcctggacagccaggaccacacagagaaaccctgtctcaacaaaccaaactaataataattttattcattatttataatttttataataatacttataataatataattattaatagttattattattatcattattattattattattaatgtgttttagtgttgtgatctaatttagttgaatgagcaatttccattctggagtctggcttttgtctacaaataagttctgtgactttggccaagtcactttcatcctctttcacaactatggacaggaagaaataacactccactggcagttttcctatagttccagaaagtagggatttgggtttgacttctacttggggctcagaggtacccatgccaggaggtcctagtgtattcctggcgtggtggcagccgaggaaaggagtcaaagtgaggcaaagctgcactgaactttctctgtaccaggcaggatcctggcctcttacacctccaaagcactcagtttcactgaacacagatgaacgggaggactatatagatttatgtactgatctgcatgctggggtttcaaatgtgattcattatgtgccatttcctctacaccaatccatctgctaaggtttccttctgcactgcagaaggaactcggagctgaaaggcggctttaactgagaagagaggaacagctcgagatggttagcaccacctgcactaagaaagattcaagatggtatttgtcaaatattggaagacatgtgtctgctagctgagggataacgggatgttttcagagactgttttaaagttctacggccaagagtaaaaagctgcatttgcttcttataacagtggtgatcatttctcttgtgaaatgtttatctactgatgatctcatatggcttcctttggattgtcgtcttgttttattttctctcaccaggaaaagcaaacatcttggttcccatctctttctattgtaagtgctaagagtgtgacacattgagacaaagcctgtgcatttccaaggagctggttaagtgcagaaagccaggtgggtgctggtgggaatgttgcagtgtgggcatttggtcatgaatgcctgctgatcctgaaccaggtggaagaagaaacagataaggaagaggcgaaacaaatgtggggacaggatagaggctgcattctactcaagggtgcagcagcttaggtgggtgaagaaagcatcactcagaccaacttgcagtgtgtccaagtgtgtcacactactgtacccatacagtgtatttaaatgctacgttgagagcagctggccttcaaccacaaataagaaaaagatgcattatacatagatgggcatttaactttttagtattttgatttattgcccataaacattacaatatagcatcacaataccatatttagaacttggcaaacctattttgtagcttttctttttattctagaaaaagaacatttttgtcattaaagtaatagaaggatggcttagaaaataagaacaaatgaatccataataaaatccatgattaccataaaaaaaggttgcctttctctttttgtttgtaatagggtctcactatgtagcccagactgtcctcaaactcacaatcctactacctcagtctacctacttagtgctgggattacaaggctgtgccaccattcctagtttacctcttgcctgttttgttctacttattttattttgcatctctacagaatttaagtcatttacatattacgctagtttcacttctgttgctgtgataaaataccctgacaaaaaacaatttgagatgaaagagcttttttgttttacaattctgggctacagtctggggtggtttgaatgaaaatgtcccttataggcttagatgtttgaatagtttgtccccagctggtggtgctgtttgggtagtgtggtcattgaataagaatggcccccataggctcacaaatttgaatgtgtagtcaccagggagtagtactctttgattagaaagattaggtaggaggtatggcctagttggaggaagtgtgtcactgggggtgagctttgatatttcaaaagcccatgctaggcccaaactcattttctctcttggtctgcagatcaggatgtaggtttcagctgctgttcctgtactatgagtgcctccatgcttcccactgtgatgataatggactaaatctctgaagctataagcaagccccaattaagtacttccttatatgagagtttccttggttggagtgtctcctcacagcaatagaacagtgactaagaccagtaggtttaggaagtatggccttgcttaaggaagcatttccctgaggcgagctttgagagttcaaagactcatcccatttccagtttactcctctgcttcctgcttgtcaatggagatgtgagcccttggcttctgcccccgatctcattcctactgcctctgctccaccatcgtagactctagctctctgcaaacctcagcccaaagtaactcctatgctgagcagtggtggcatacctttaatcccagcactgggaggcagaggtcagcctggtctacagaactagttctaggacagccaaggctataaaaagaaaccctgggggagggggggtggcaccttgttcttctacaagttgccttggtcatagtgttttgtcaggaatagataagtgactaacacacattctatcactgaaggaaagccaaagcagaaattcaagcaggtagtcaagaacagagaaaggaatgcacctatgcagcttgcctgcttcatctagccttctagggaaatgaggttatccccaaggaactaggtcatcaaataataaacaagacaatcacccataggcatgcccacatcaattgataatcagtacaatctcccataggcatgtccacaggtcaatctgatctaattattttcaaaatcaaactcctcccaggtgattctaggttgtgacaaattgacatttaaaaataaccagcaggtatttaaattttctatcttacgttgtagaacatgtttttatcattcttatttactatttaaaagtaagtttaggggctgaagaaatacatcagtggataagagcactggctactcttccagaggacccactttcaagtcccagaacccacatggcagctcacatctgtctgtcattctagttccagggtttctgacaccctcacacagacatagatgtaggcaaaacaccatgagcataaaatttactaatgcagcaacacagaacctcaacctgttgattttatacatacgaatcaaggaggtaggtttattatatacagctgaatgaggaggcaggtttatgaaatacaactgaacaaaaaggcaggattagctaatctcaatagaatatctcttcaggggagcactcttatattatagtcattcttgaggaggaaactgtggttgatggattgtatatacacgtaaacatttctactcagaccagaggaaagtctttgccatcctaaaccttacctttggagggcttcaccactcccatgagtctgaggcactggggtctttggcatggccatgcctatatcaaacagtacagactcactcaggttttggtttgttctccacatctggaaatataggtcggcgggtaaaatgcttgctcacacccaggggacttgaatccctggccctgtgtcaaagctgagtgcagcactatctgtaaccccaacacaggagagtggagacaggcagatcctgggccagctagtctagtccaaatggcaaactccagtttcagtaagagatgttctctcaaaaataaaataaaataaacaaacaaacaaaaggtgaaaagtaattaagaaagacatcctgacgtcatcttccaacttagacatctcccagacagatgaggatacccgcaggcacatgtccatgcaaatgtccatacattcatacaccatatatataacacacacacatagatgtacacaaaaataaagtaaaataaagcttactggttgtattgtatttccaagcatattgtaatttatttatcctgatactaattctacggactattaataagttattttacaaaggagctcaaaagtaaatagattagagtatatcgacttggaaaaaataatgattctactttaaaactacaactcttctaaggtattatggactgggaagttcagaaggacggcatggggtacatttttggtgttctccagagtatgttctggaaagcaatgtcttaactgttgccttcttttggatagctaaattataagaacatttttccgcaaaacaatgaagatgtctctaaggccatgtgaaacagtcttttccatattgagactcatttcttgaggataagttcttagaacttaaaacaaaatatcacaagtggaagcttttgcatgattttaaggtctttaatatacatcaccgatattgccaaatttgatttccaactgattcactggtatatagaaacccatatggcaaatacttcattccagatcaagtgatattacaaataatccctgccactcttggtaatgtgatgagaaaaacaattaatttctagtcagcaaaactattttcacactatgctaggtgtacccttgtgagattaaggactttttaaggctcagtaaatgccatttcttgggctttgtttaagtttgttcccaagaccatgtactgcaagtgtgatgcccagagttgaggcagtaattagaggctatgccctcctgagttaatgctggtttgcatagtgggttagttctcaagaaagtgcattgctataaagtaagcctatactatgtatttgcgttcacattctggagtctgttgccatatctatttctctgccagattttgagacagccagcaagacctgaccaagatgccagaacatttgttttataatttgcccagccttgagtatttgagtatagcaagccaaacttaactaagacagcaatatacttttgactattatttattcaaattatagactaaactacctttgactatcatttattcagattatagactaaggttttattttccactggtcacaaagaagctgaagattatactggttcctttgtaaatagctagataggaaaagacacatggtatatgccagtaaatatttacagaatgataaaattcatgaatcaatatactccaaatgtttctttctagccacctatttagaaacagtcctctttcccccatcatcctgtatcagagtgatgactatagagagcccttagccatcagtgaccaaggcatgccagggacttttaaaatggctgatgggatttttaggcatttgggaatgctgatagaagagaatggtaggagagacaggccttgagagctaaagtcttttgttagccatgtgacctcttaaacttctctgagcctgaaagtatgaaataaacaaataccctttcaggggtgccaagtaactccagtagacagaaaaacactttgaaaagccagtgctacaccaaagaagcaaaactttcatcaaagtcacagtgaacaccttggccagtgggtaaggatagaggtagagtggggcagttggataaaaaacaaaaggaatgcattttctttaggaatcaagaccagagataacagcaacattttctgaagaacaaaagtcttcccccttgctggtttcctagactctttagaagttgctagaagtagcaaacatcaggataatttttctgttgacaactgggattgattatatgatatctattttatcctagactttttggtaatgctggttttattgggttttaatcagcatgattgtgggaaatgctttgaagtttaatttaaaggcaacatgaataaaggtgtgtagggggaataacagcactgtggtagacataatactaagtaaatgacaaagcagtgataattatatgtatttatggtagacatgtaactttcatgagacctgtatacaaaggcctttggaatttccaaatctgtgagtccagaaacaggaggatggcatttccgaaagcccctagctcctgaacatcatggaattacctaaaaacagatactattcactgcttcctaagctccaagttattatccaagaacccatcatttattttccagttttgctaaggtgtaactcatatacaaaagctgcacttatttattacattcaacatgagaggtttgggcatgttcatacatccataatagcacttattatcaccacagtcaaagaaaaaaggaagtccttcatttctgaaagttttctgtacccatttttttctttttttgaatttaaattctttaattactactcttttttacatatccattcccccattcccttgccctcccatcctcccatgttccccaccattcccccaaacccatcccccaactcctccccagggatagtgaggccctccaccagggaccttcaaagtctgtcatatcatttgggggaaggcctaggccctccttgttgtatctgggctgcaatagtatccctccatagggaatgggctcccaaagtccatttgtgctctagggttaaagactggctccactgttataagtcccatagacttccctggcctcctagctggcacccacattcagagggcttggttcagtccaatgctgtttccgcatctttatgactagggtctccatgctctcactaggtcaggtcaactgtttctgcgggtttctgcagcatcatcttggcttctttgctcatccctcctccctctccacaactggattccaagggtatggttcagtgcttggctgtgggtgcctgtttctgcttcgaacagctactggataaaggctgtaggaatggtaaccaaggtagacaacaatctcattataggggaagggcatcaatgacattttctccacccctggttagattcttagttggggtcatccctgtggatcccctaacctttcccctgtgccagacctctctccatacctgtactgtctccctctatcaaggcatctcctttcttaccctcctctattcctcccctgtctcagtcctcttgttctcctccctccccccctccttcccttctcacctccttcctctccacccacgccccatgctccaactttgttcaggagttcttgtccctcctccccttcttgagggactatgcaatcttctctcttggggtcctccttgtttcctagctcctctggcaggactgtagactggtaatcctttgctctatgtctaaaaatcatatatgagtgagtatataccatgtttacctttttgtgactgggttacctcactcaggtttcttctagttccatccatttgcctgtgaatatcaagattccattgttttttctgctgaatagtactccattgtataaatgtaccacattttctctatccattctccatttaaggggcatctaggttgcttccaggttctggctattacaaataatgctgctatgaacatagttgaacatatgcccttattgtatgaatgtgcattctttgggaatttagccaagagaagaactgctggatattgaggtatcccattttcctgagaaacctccatactgatttccaaagtggttgtacaagtttgcattcccaccagcaatggaggagtgttcctttttctccattttttaaaatagaatttggtagtaacaccaattatcataagatttaccctgtgaacaaaattttcagaacatgttaccatattgctaactgtagcctatagcactataaaacactacagacatctaaagcttctcatcaaatggactagctctgtgcccatcaagtctctccccttctaaccagtcccgctccctgatgattgtcattctattctctccttcccccatccatcctgttgtcttccctcccttcctttttccttctgtcccttctttccttccactaagtcttgacaactctaagagtgatggcatgtaaatatttcctgtgtgttttttttcttcactcccactctggctctatcagttggctttagaggcaagggaatgttccacaaagaaataaaatgggttcgtttgttttgtttcattcatctgtctaactggatgttgttcctacctctaatgtttccttctatgtggaaaatccaaaggacagagcacactcgggcttctggcagcatttactcagctacatgtaaagacactgggctgtggaggggggatattctttagaggatagaagccacagatgtctctcagcatctgacagtatacaccatgccaaataacaaagagtcatctgaccttaggtctcaacaggacagagtaaggggaaacctaactcagtgagaattagaataatactaaactcatgactaattgaagagtctgaaaagccagtcctcttgtccttttttacctttcagactttcctgttcacaaactacattcccatttctttgtactatttcacagagtaagtttagtggggcaaaaccttccattcataaagaaaacctgcagtctaagggtgcatcttcaattcagatcagtgtccggaaacccatatgcttatactccctaatccttactgattaaatgggggaaaaaacctagacattttaatctccttcttccccctctctccttccctctcccctccccttctttctcttcctctctacctctccccccaatttaagcataaacaggaaaggttactattttttctgttccttcaagctgcaggattgtgtgtagtgaagacaacatgagataggaatgctgcatggccagctgtctaactgactagtgagcatgtttcttttcacaccagctgaacagttgaaatagatggtaacataacaatgaatacttgaggtatggcagctggaaacactgtggcctacagaggcagagaaacaggagaattggtttatttcaaaaatggaagaatactcctgaatgggaacaaaatatactcatggtgcccatttgggatgtacctggtacatatagttccaatttgaaggcaagagtagacattcatttcccctgtgataccatctttcttataccctttgtccatgtggccaaattccgtacctcgcttttgcacctagcatgaggcagaggcccagcccatagcatcctcaactcctctaggcctctgcatggatcagcacagaatagaagcataaaggaatcccagtattgaattttcaatgaaacaaactggaacgaggctgtttttactcctactggatttgaggggctatgagataattagcctaagctgacaaaaacatgatgtacaaaagaaaaaccaatatacttagttgcaaagatgactttgtgggcaagagtacttgcaatagaagcatgaggacctgagtttggatcaccaccactcacataaaagttgagtgtggctacatgtacttataacccaataccaagtactagggaataatccttctgtatgctgtaaatacatattgctttcattagttaataaagaagctgactggcaaatagccaggcaggataaagttaggcagaaaaaccaaacttgggacagggatgaagaagggaagagccaggcatgcgagtgagtcgcccaagaaacaagatgctagaccacagataaagccatgaaccacacagaaatacaaagattaatagaaatgggttaatttaaatgtaagagctagttaataagaagcctgagctataggctgaacatttataatttatattaagcccctgagtgattatttgggactgacagttggaacaaaactctgcctctgtttacaaccagggttacgagtaacaagtagaaaacggaataacccagaagctcactgaccaatcagtcagcctagctgaaacagtgagccaaaggttcagtgggaacctctgtctcaaggctcacatgatgtccacctcttgcctctatacttgcacacacacacacacacacacacacacacacacacaaacattcatagttctgaacactgagatatgcatgtataacagatcctaatggaaccgtttgatcatgcctaaattttatacttcttagttacatgagacaataaatttcaccgctactaaccgtttacaacagaaaatgcccaaaataatgaaaacatcaaccctgaactcatcacttcaatctatccctaaataaagcaatccctcctaattatggatacttaatgcagtcctcattttccttcccaaattgtatacttttgatcgtatttgttcagcttctctgttttcatttgaaagcatttcctgtttgtcatggatataatgtcatggtgaagtgatgctacaaacaagattataagtgaaccaccatcatatgaaaaaatgatttccacacttacctgaccaaattcttggaaagtctcaccctaactgaatgctattccatagtaatgactaaaaataacaacagaattttgtcagtagatccttcctctttggtaattttcacatatagccaccctcagtacattgggtttggctccaggcctcccttggataacaaaatctaaggatgccccagttccctatataagatagcaataacttctccatatagctatgttatctccccatgctttggactagtaccaaatagggtgtaagtattttgccaatttttgctatgatgcattctttaaagaatggggataagaagaaaagcttgagataggtcgatacagcacattctgaacattgttaatccaagattggttgagtccacaaaatgagactctgcagatacagagggagacttgttatgctaattgcttcctgggtatctagttatctcacttgagcctataacaaagactttatttttctattttatagaggaggaatctgagatgatgcccaccaaaagatgcaggtacacagctgggcgttggtggcgtacgcctttaatcccagcactcgggaggcagatgcaggtggatctctgtgagttcgaggccagcctggtttccagagcaagtgccaggataggctccaaagctacacagagaaaccctgtgtcgaaaaacaaaacaaaacaaaaaacaaaacaaaaaaaaaaaagatgcaggtacactaccactctgcagtcttcggtctgtttttactactgcaaataggagaggggtggagtagagtggagtgatagcagtgattaccggtgttcttgctatgtgcattaagctggcccttcacatctgcctacctcaaacaattactactgccttcttagatccataccttccgtggttaccaactgtcgatgaatttaaacgttttggaaaggggcacataacataaaaaaatgcagctagctgaaaggctggttaaaaattctgagtaatacagaaggtcattttccttttcttctctgtaggactgtgtgtttgcacttggcaggcatacatactgcggccattatccctgctctggggcagcaaccaatgggtttggtgtgactaagaaagaaagtgcttagagctgagctcttggtggcctgcttaaccttttggctgagtccagtttccctgctgacacctaaatggactcaagagaagccagggagctttgtgaatatgcaggagttccctcagaggacggcaaaaggcctccatgactcaaagaaaattaggttcctcagtagtaaactgccccccttgggggtgggggggagattccagagaagagaagggaaaaagaagcaataaatttcaaacttctcctcccaattataatcaaaacaagggcagtaaatgacagcagagaattttagatacttgcttgcctggtagtcatcttccaacccacagcctctgcatgtgtttatttttctttaactgtcgtgggatctttggaacatcttgagtatgcagggtggctctcgcatgtttgcacggctccagcttgttgcagttgctgaccgggttggatcatgctctgctttgatctcttaaaaatgaaagccgtttttattgcgaattgtaccagaatgatttcaaaactaaacaaaccacaagggcatgttctatttattctttattactcacacatttaaaggaacacaaaggctctccttccctcccaccctcaaagacgaatgtttaaagcgttctttttaaacaaccctctgttttcatgtgcgaggcaaaatcctggagcgggtgcctctgaaaatgggtcaacacattggcattttccatatgtaaaggacaccttgagtgacttcactatgcccttgcctgggctataaactgtgtgaaatctagcattgtatggtcatgtatcattgggcacaatagctaaactctgattttcacttacacataaaatgatggtaaaagcacagtctcgtttaatttaggtgttaaaggaaaagaatgaatgtgatttttatttgtggtgttattttcaatttataaaaaaggaaataggactctaaggaaatcaaatacctgttcaggtactcacagattaacacacgataagtttcagggaccagtcctgctctggtctaacatttgcttctttctcttttcttcataggaaagaaacatgggagggagaatttcatcaccctgagtccctaacacccctgtaaaagagtcctccttataaaaacattccaaagctgtcattttctcatctcattttttattgaaatgtcccctaattaacagatactatcatgacaatgaattgaggggccagggctttgaaggcactatttgcataatgaggtatctgtggctagagttgcttcctttggtctttttgatcaacagttagtgatagcctcatctcctccatgatgtagccaataggttattaaaaggcaccaaacaccctaccagccttgcacttttgattttctgccatactctccaagttaatgaggaagagggtcaagggaatttattcctgtgcttcaggaaatccacaaacaatattaaaagagaagttggtggcagattaagaaacttttaataaccttgtgcaaaccttccagacactcattactcagtgcaggtgactgaaatatgcaatcttaaaatatgctatgggagttagtggggagccagaggctgttggaggggggtgttggggagacagaaggggtagaccaagtaggtcaatgaaggagtccgctccactttcaaaaatattactgtgtttttgctaaaataattacataaggagaaatgttagaaaccttggagggtcagtcttacatacatagtgtcttaaaacccagagattgatctaaaacatatgtggtgttctctctgtctcgctctccctctctctctctctccttcctcctcttcttccccttacctcttcctgtctctttgtaagacactatttttgaagatctttcctgatttcttgaccacttatggtctaaacattgggcatttcaagacaattccagattctgtattaaacaggtctttatcatccatttgctttttctcagcatcaactgtgaatttccacatagacagagattatcagtttcatcccacatctagtttaacaccaaatgcctcaagaattatatcctttactggagatatagctcggcagtgggctgcggtatgcaatggtctgggttcaatttatcaatatataggaggaggatcataagtgacaggtagcaatctgagactcaaaaactgtaagagaccaaagccactcaaatattaagagaatcttagaatatttgaacaaaccctgaatccaaggctgcacccttatatcagtttctttcttctaaattcatcattgttgtcatctctgcccttttttctcacttaattttttttcaaatagtcaaatacagtaacatttgtgagtgattcataaattcaacataactataaacaaatgtatttccaaggttaaaggaaggtcagtgtattggctaccattctttctgctgtaacagatgcttgagagaacaaactttaaagatgaacaacttactatgcatcattgtttcagagggctcactctatggtcacgtggtcacatgtgctccaggttcttgggagtatatcatgactgcaggagcacattgcaaaatagaaccgctcagctcctggcagatagaaacatcgagaagggacacagaaggccagtgactgactccagtctgggctcacctactgaagttttcagatcttccccaaatagcatcgccagctggggacctgtgctttgactaccaacttttttgagggcatttcacattcaaaccatagcaagaagttacagttatagaaaaacagaaagagaatgacacacctaaaatacagtcaaggtcacatgggctataatggagctttattagaccaaaagtaggaactattttctatgaaggaccagagagtaaatagtacagcttttgtgacccatctgtttcatctcaaatgttcagttctgcaatagaagcagcctttggcaacctgtaactaaatgagtatggctgaattccaataaaaccttatttgtgaacatgaacatttgaatttcatattattttcatgtttataaaacattatctttctttaggtttttattttaatcatttaaagatgctttgaaagacagttttaaattgcaggcatcctcaagcagatcagatctgacccacagggcacagtttacagatctctgatatagaacaaaggaaatgatataaatgctgacttaggtgaatagtatttgataggaaattcagtgtcactgaagttcattgtgaaaattacaaaactatattagtctggggtgcagtgttttggatcataaggaatctcaatggactataaagacatttgcaatattcttaacaaaacagttgaatgcagagacatcaggctacatttagaagtttaaatgccactgcagacccaaatacttcccatcagtttcaccatccattctcagcatgtggagtctcacacttatgcattccctgaagactgcagccatgtctctaagccctgtatcctccctgggcattctcacctggaagacagagaagactcattaccaactcactcttggccatattaggttcttctgtcagaaagcaaatgcttcctcagaaaccccacttcaaatggcctctttgtcaaaagtggctgatatgggcatattcttgcattgcaaaagaaatacaaagttatctcctgttggctcagatcagttgacccaaacaaaactggaattccagcaacaagatggaaacagtggtttttgccagagtcactgtcaagatttgccttaaaggaacaatgcattatgggaacttgtgccagaggccaagttcaggtaagatgaaggtttatatctcataagttcctttatgttaccacttaccaacaatacgggggcagggggaattaatgttttcatcttgtaaattaacaacaacaaaaattacaagatccaggtctatatcttactcattatggtgtccacatcctgtcctgtcacatatctatagttcttgaggcataatgaatacttgagaaaatgaaatattaggacatcttttccagtccaaaaatgaaagagaagaaaataaaatactaagagaaaaacagaaaagaaataagaatgagcatggttcataaactgtggcacatgaaaccttcagtttttccctgagaagaggccaaagcccttctgggagcccttccactcccgatctcttagtattattggattctctgtgggatggaaaaattgtgtgaagtcttttgcatcatagtaagtaaacaacaacgttcaaaggaaatgtcagtaaaaggctggccatgctggtgcacgcctttagtcccagcacttgaagcagaggcagagggatctctgtgagttcaaggccagcctggtctactgagcaagttccaggacagttagaggctgttacacagagaaccctatcttggaaaaaaaagaaagaatgaaagaaaagaagaaaaaaagaaaagaaatttcagttaaaccaaatgaaaagagatgcttatatttgagatacttcatcaatcagcagtttggggactggaagataagctcaggtagtaaagtgattgccttgcctatggacatggacttgatctccagaacccatattaaaagaaaacataggcataatggtatatgtttataatcccaacattgagaagactgagacaagcagatcactggggctccctgagcatccagcctagcctatttgctgagttccacaccagaaagagagcttgtctcaaaacaaaacataagaaacaaagaaagaaaagaaaagttgggtggcacctgagaaatgatccccaaggttgttctctggtctccacaggcatattcacacagatgtacatatcatatacgtgtacttgagtatgcacacacaaaaccagtttgaagctaggttttcaactaccagaatttagagatttcattttctgtcccctcgttttatgacatatatgtgtaagagtatgttatagtcttttctacccagtaaaccatggccttgaactctgcactggtgccaacacccagtgagtaaggcaggggaagctgtgtcaggggcaataaagagaatgatgaatgtcttttgtgtctaatttttgagattgtgtattatgaattcaatgttgtcatcaaataaaatatttaacaattacatcattaataataagtttgttatttgtcatgctgcatggtaaagagacagaacgagaagtagctcgtatacatggctataattactattaagcatgtaggaaagcacacatttgatactctgtcagtagacatgtcgatgtttattactttccctaatatcttgtatagttttagttcttcactcatatggactcaggaacatgaacagcacagttcataaaagaattgcaggctcattacagaccagtgtctgaagtctgcctccttcattggtagttgctttgcttcacctcttagcctctttgtttcaattacctcttaccttctcatgtaattattctactctccctgttccttcttgtgtcccattgccttagagagcaatgaagaacttttttgagacaaccaattctgtggagttgtactacttacttggggagatatcttgacaacatttatgggcaatgcctattgtgggccttggatgtaaagggagttagtggttctcaggaggtgttgtttgactttcctaagacctagagtaaaccagcctgttttagtcagtgttctattgctgtgaagagacaccatgaccacagcaattcttataaaagaaagaatttaattggggcttgcttacagtttccgaggttaagttcattatcatcgtggcagggggcatggtgctggagaattagctaagagctacatcgggatctacaggcagcagtaagagagtgtcactgggctgattgggcttttgaaatctcaacacccaccaccagtgacacacttcttcccggaaggccatacttcctaaacattctcaagtagtgacactccctgatgattaagcattcaaatatatggacctatggaaggcattcttattcaaatcaccaaacatccctgagtgttacagccactggaggatgtcagatagcaagaagggtctggaatatcagtagttcatgccaacaagaaattttttcagtgtgaagaatagggaagagaaagagaaaggatcaaaaacactgaaatcaataaagggcagagagtacagacagtgaaaaaaaaatgggacttgagaaagaaataatcaaaggaatgaatgaggaaccattaagctgaaggaactcttgtaagtcatgacatccagtaaccagtcaaattcctggatgctctatacccaagatgtgaatggaaatagaacataaaccatgtataagaaaaaaaaaaatctgtagccctactatatacagatgatactttcgtggagaaggaagtcagagaaacatcaccctttacaatagccacaaacaacataaaatacctcgaggtaatgctaaacaaaaaaagtgaaagatctgtaccttaagaattttgagtctctaacgaaaggaattaaagaagatactagaaaatggaaggatctcccatgttcttggataggtaggatcaacatagtaaaaatggcaatcttgccaaaagcaatctacagattcaatgcaatccccatcaaaatcccaacacaattcttcacagaccttgcaagaataattctcaactttatatggaaaaacaaaagacccaggatatccaaaacaaccctgtacaataaaggaacttctgaaggcatcaccatccctgactttaagttctattacagagctatagtcctaaaatagcttgttaatggcataaaatagacaggtagaccaatggaatagagttgaaaaccccgatattaacccacacacttacgaacacttgatttttgacaaaaaagctaaatttatacgatggaataaagaaagcatcttcaacaaatggtgctggcataactggatactggaatgtagaagactgcagagagatccatgtctatcaccaagcacaaaacttaagtccagatggatcaaagacttcaacatcaatctagccacactgaacctattagaagacaaagtgggaaataccatagaataattggtagcatagacactgagatcaacaattgataaatgggacctcctgaaactgagaaccttctgtaaggccaaggacactatcattaagacaaaatggcagcccacagactgaaaaagatattcaccaaccccacatctgacagaaggctgatatccaaaatatacaagaactcaagaatcgaatcaccaaaacaccaaacaatccaattaaaaagtggggaactgaactaaatacacaattctcaatagaggaatctaaaatggctgaaagacacataagaaatgcaaatcaaaacaactctgagataatatcttactcctgttagaatggctaaaattaaaaagaccaatgatagtttatgctggagaggatgtggagaaaggggaacactcctccactgctgggaggagtgccaacttgtacagccactttggaaatcaannnnnnnnnnnnnnnnnnnnnnnnnnnnnnnnnnnnnnnnnnnnnnnnnnnnnnnnnnnnnnnnnnnnnnnnnnnnnnnnnnnnnnnnnnnnnnnnnnnnnnnnnnnnnnnnnnnnnnnnnnnnnnnnnnnnnnnnnnnnnnnnnnnnnnnnnnnnnnnnnnnnnnnnnnnnnnnnnnnnnnnnnnnnnnnnnnnnnnnnnnnnnnnnnnnnnnnnnnnnnnnnnnnnnnnnnnnnnnnnnnnnnnnnnnaaaaaaacaatggaatcttgaaatttgcaggaaaatggatggaactagaagaaaccattctgagcaaggtaacccaatcacaaaaagacaaacatggtatgtactcactcatatgtggattttagacacagagtaaaggattaccagcctacaatccacaccaccagagaagctagtaaaacaaggaacaccctaagagagacacacatggtcccctggagaaggggaaagggacaagatctcctgagcaacttgggagcaaggaaggagggggaagggagctgggagaatgagaaggggagaagaggagggtgaaggaggacatgagggagcagaaaggttgagtcaggggggagaatagaagaaaataagaaaggagatactataataaagggagacattttaggtttacagagaaatcaggcactagggaaaggtctggagatctacaaagatgacaccagctaacaatgtaagcaacagaggagaggctaccttaaatgccctcccctgataatgagattgatgattgtcttatatgttatcctatagccttcatccagcagctggtggaagtagaagcagacacccacagctaatcactgaactgaactggaatccagttgcagagaagaatgagtgatgggcaagctggtgaaacccacagaaacagttgacctgaacatcggggagctcttggtccccagactgatagcatgggactgatccagaccccaggaacatgggtttcagtgaggaaacctcggaaatctacatgaactcttgtagcagttcagtacttatccctagcataggtgtggaccttgggagcccaatccacatagagggatactctctgagtcaagatacacaggggtgggcctaggccctatcccaaagtatatgatagactcttatgaccccctatggaaggcctcaccctccctggggagcagaaaggatacgagataggtagggtgttagttggggggatggtaggggaggaggatagggagtaggaactgggattgacgtgtaaaataatcttgtttctaattcaaagaaaaaattcccacatgtattcatggatatacatatataccattacacacacacacacacacacacacacacacacacacacacactttaagttccttcagctgagatctttacacttccccaggatccccatcattctggggtattagttgtacagcccccagtgaaaattctagcagttttttgatcagtatgttgtacaggtctacagatttcttctttaggaggttgttgccaggaaagctgtgagcagcaggttacaaatggaggcttagacatctgtgattgagagctggggtaaacacggtggcgcacaacttccagacaatgttactcctggttgtgggaatgagagttataattcattaatggaaacaggaagtgcagacaatgctcaatgaggctaaacagcatacaataaaatccctgggggaaatctactggcaagacttcatagaggttaaagccttcctctagaatcaatcctacctgttttagcaactttcttgaggtcaccttaagggctatctcccacccctaccttcttcccatgctcctgaatataccttgttcattgattcttggattctcataacagaatctgaaggttttaatcccagaattcacctcatacctcatggattatgtgtcaagtgttaggtcaaaccatttataagatgaatagtgcttaactcaaggagtttacagtccaaaaaactcaatgaataaaaaagcaatcaattagaaagaaaaactgcatccttgttaaaattagtattaaaacgttaattgttgtcaccatctgaagacaccctcttaggggctggagagataacccagtacccagtcaggcagctcacaaccacctgtaatggcatcacagggaatctgacaccactttgctagactccaaagatacctgctacccactcccacacacacacacacacacacacacacacacaccacacacacacaccacacacacatacacacaaacacatacctttaaaaaaaatcttttaaaaaaagttgccctctttagacaaattttctacaaaggaatatctcggataaggaagatgaatatctatggtctcctatagtctggaaacattgtttttaatgtctcatgtcttaaagcacagaagattatgtcccccttacttccagggaacatatggcattgttggcaacatttttgttgcacccattgaaagagagcacagaggacatagaggctggaacagcactgatcaccctgtcatacacagtatgtacccagcaacaaagaatatggtcagctcaaaatgtgagaatttctactctctattaacagctatactagctttctatgccacacaatgttgggtgtaatattgttttatatgcctttcttttcactgactacaactgacactatttaaaaatgccatgtttattgggtgctctggcttggaatgtggccccagctgggctctgtcttggaaagaaaggctgatccctttcttcccatcgatccactctctgcacaacttggatgcagtttcctctggagacagcccaggagctcacaatggagggctgggaagtattatcaaataaaattcaaatgctttatcaaatctgcatttcagaaaattgataaatacttcttgagcaagtacaccaagtaaagtttaagacaagatttagaatttcaacttaaattagaaatgttattatttttattgggatgagtgttaatacacaatcttgctatgtagctctggctgtcctgaaacttgctatgtagaccaaattgaccttgaactcatagagatccatctggctctgcctcccaagtgttgggattaaaggtgtttaccaccaagccaggctggaatattaattttaaatataagtatctacttatacttgatacttgaaaattagttaaacctaaaattattcttgaaactaaaatgaaattctgcatgggtaccctatattttgtctgaaaattattccccaactttaaatgtatattgtctcttctcaatttctatgacattatgatttatatcccatattctgcattcaattatctatccataagtacgttttgaacaggcaagtgaaatctgagtgagtgtatgtgttgggccctatacctttaaggaatgacttttgcctggaaaaagtattctaaacatttaaagaacccaagaaatatttggtggacagtgtttcatatcactttgtgccatgctgggaaactagaagttctgtcaggttcaataggtgttcctaaaccatgattttgagaaacactggtgaaaatagactgacgatgaagatgccaagggggaaaaagtattacctctaacgcaaaacacactgatttgtcttttgtgtgaaaacaggctgaagaacagccttgtctggcatctccatggccagagatccaggcttttccaactgctccctctcccttctccatggtggacttcgttgccatggtccaagtagttgctggatccaaacctggccctttttgttcactttccataaacaaagagagcaaacggagagcaaagtgcccctctactttaaggagcttccttatgcagaagaacaactggttagctctatgtagtttcgtctcacacacacacacacacacacacacacacacacacacacacacacacacacacacaccctgtgtttaggagagaaacagagcagctcagtgtgaggttaatttccggaagatatagaaaatgggtgcttgatgggaaaggaacagctttgatgcaaagcttctccaaagccagcctctaagtccaaggctgcttgtgacatgtggtcctcttaaaactaattggcaatagcactggagaaattccagaccagcatcactcagctcaaatccttgtcatttgtttgcaaatgtcattcattttaccacctttttcagattttctggcccatcctgagccatcacctacattctgcatcatggtgaatttttgtctgttcacattaactccactaaactgtaggcatcttgaggaaagaggcaattttaaaaccatgcctatgctctccctctttttacatatactacacatgtaatatttatttcacgaatgacccactgcctcctgctaagggacacaagtgtgacagtgagacatatgtgcacaggcatggaagggagacattcattttatcattaatggttgcaaagataatgtattgcagagattatttcattttgttaagcggatttggtaaagagtggaaataagtttgtttgggaaccataggaagcttttaaatataattgatgtgaaagtcttaagatttgggataaaaaaaaaaaaatcctgtcccagcctgctcagaaaagccgaatgtctgcaaaacttgccattacggagccacacagtgcagaaaggctgttagggaaggctaatgcctatacagctggtgtaatgaagaaatggaggtttaggcatgggaaaccacagctccaacagaaggagctgaaaagatatagataagattagtgacatatgtaaaggcccagatactgtgtgacaaagtccacccagctgaatagggtgaagccagaagtaataggaaggccatgttctccctaatcctccaagataagctgttccatccagaattatcagccaacaatcttcagggtatcaggctgaaaatgaagtttcagactgctttgattcctcatccataaatgagaaagtgcctgaaggatctttatttattctcgctcccgccgaaacactcttcaaaaagtgccaatatactagcaacagatgcagaaagcctcccttcctttgattgacagaacatgatataaagcaaccctcacttgacatttcagtttcataaggctcctagcaggggcagggaaaaaaaaaatcccgaagaaaaaaaatccactagaaaataaagaggatttatgcaaactcacatgaatgtttttagaattaaatttaacagttttctttctctgcagcccctatctgatattttgggttgcagatgaagaatttcagtagggctaatttcagccacgtgcatattaatgttcatggcttattaaaacaaagtattcacatgttaatgtttgttgattaccagacacttaagttgcttagttataaatgattggggtattcactctggggaggagatgtttaatttggtgttgtgtgtgctttaatttagacttcaaaatacataattgaatgagaaaatgtcatccccacttttgcatttcagttttgaaaggtcattccatggttagtttgtacattttcaaattcttgtcacattgctcaataagatattaaagtcaactgcacccctcgacatatttcttgcaattgacatataaatgttctattgaaataagaagtgagtttcatgcctacagacatcttaaggaaaaaggcttgaagaaccttccaggtgagccctccagaaagatactaattctttttgttttagcaaagccaattctttatattcaatctgagttttctgatagattcgctgtgctggagtagttagctctgtggaagccacagtcttctagaactcctggcaaacatcaaagctcctttggatcctggggttcactgcctgtcattcaaagagcatttcaaatggaaatcttaagattgcagagaaaacttgaggtgagtaagagcatgaggaagaatagatagatgtgacagggctcagctgggtggcagtcagatggttccaaacacaattctctcatctgtgtccctttctgcttgccccaacttccaacaagttgaacagcagggagctagcaagtattactaataattgtatttgttttttgctgtagtgggtggtagaagtattcaggttgcttagaaatcttaattattttacagaaagaggcagaaacgtgatgcaaataagcagaaaagcaatgatcagtgttccagctggactcttagataccagcaggttacagaggggtttgtctcccagtctttattgcttgggtaagaaatggctgtaatgtttgcagacttcaaccaactaagggcaccttagactcctcaatgaagaacaagcgtcatctcagaagaaaaaatcctgtttgaattcctatagtgagggggcagagaaagagaagacaggaaggatgatggaaaacatacagatagaaagaagccttctcataaacacataggaactcactttaaaggcggacctccatagccctttcattcagcactgacatatccacagtcagtgcaaaattcaaatgatgcttgacaaataccttggggtgggaaggcatgatgagttagtttgaatgcaattgacccccataagttcagaggaagtggcactattaggaggtgtggctttcttggagtaggtatggacttgttggaggaagtgtgtcactattaggggtgggctttgaggttccatataagctcaagccatacccagtgtctcagaccacttactgttgcctgcagaatcaagatgttgctccttctccactcttagctccttctctggcaccatgtctgtgtcctaccatgatgaaaatggactaaacctctgaagatgtaagctaccccaattaaatttttttcctctataagagtttccatggtcatagtgtctcttcacagcaatagaaacacatagggtggggttgggtatcaggatttgtgattatgccctaggaaaaatttaactaaattttacacatttgttcaactacaggccctgacacaggaataaatttgaaagcatatataaaacttgttcctaagaagctgaaggcttgatttccagacatccacaggggatatatttgaataaccatagttctcagtgcctcagcccttcaatttatatcattaatcaattcagtaattcaacaaatgctgtcttggtacaaatggtcttctctcttcattctgatgcctaagatgacaggctagaagtggggatgtttcagcagtatcttgcactcccactgggcaagatgaatgtgtcctttggtgtgtcaaaagcattgtgtcataaccacaccttaagaaagatgtcaaaaatcagcagactgtactgaaaatttggttgctatacaagtttctattgaaaattaatagtcctccttttaatctcctgatgagactggaacattgtatgttttacctcgttgaattccagaatatttctaggagacaagtaatataagccctatttttcatagaaggacacagagcccaacagagagagatacactgcccaagaccacagagataatgagtagctgaacacagttgtgctctcaacttatctgactacaagcccagcctgtggttaccactttatattactaaatttataactattttggctagaagtaatttctacccatcttttgcactcttactttatattataatttgcttaagtacagcctgtattttacttgtaagatctctggattttcaagtttaaagaaaatttctgagcatggtgtgtgcataagatcaccacaatatgagtatatggtatcagtgtgtgtgtgtgtgtgtgtgtgtgtgtgtgtgtgtgtgtgtgtatgtgtgtgtgtgtgtatttaaaagtcataccatcattctaaaatgtactttccatgcataagaatacatgctttgataaaggcagcatgtcagaatagcaattataatttcaggataagcacaaattaagtctaccacttaaaatgcaaaaacttcaaatatacaaagtagattccaaaaatggccatttaacacagaagtgttgaataattcatgctgcactatatgggcaaagcttgcgtacagctggcattggtacaagtcacgtataagcttatgcactcctggttgctatttattgcccaaatttcttacaaatgtataatgttgcttatagagggaggaaatggaaatgtagatgaatctgtcaagactcccttactctcttaccaggccttgtgtcagcagaatacaatatttacaaataaagactgtgattttgttataaggtaaatataggcagacactcattaacacaggaaatgcattcccagaaaagggagtgctaaatggaaaaaacggtacttcttgtagcatagcccccatgacgctgtgtccctgagatctttgctcaatcattaacaatgcctaacaatctctgttcaagaacagacaataaatacttgaaggaatggattatccattcacctcaactcccctgaagtccttgcatgcctctgggacattatctgttctgtttagtggccacacctttggaacctgtcctcctgcgggcagaaatgtctacctgatctttgcactattctccccgacaagtgtattttccctagggtacctcaggtcacccttacatgttagaatacccataggcataagacactatggccccatatctgccatatttcctaatgcaccttttatcagcaggcaggcatcaaccttgttctagtgaccataaagggataacagaactagagattcaagagaggcaacaaattgccaatcccattcctagttgagaacaacccagaattctggataatggcacaagggaatggtttattcattcctcggctcagtatcttgagcttcaatataagaattttttttatcagtgggaagattagacacctgtattctagtataggataagacatgtacttctcagcttttaaaaatgtagcatgtgacccctgaacatggatgacaatgaggaggcctccgcattctagtgggcccctggtagtggattagtatttttcccgggtgtaagaagggactttgaagggatgcactctaggcccaacccaggatgatgtggtggactttgaggaggtccgtcgagtgccctaccctgcctgggaattggaagatggatggggtaggggacaggcaggagttgggggggaagggttgggaggaggggagggagaagggattgacatgtgaagcaagcttgttcctaatttgaactaaaaaaatttaattacaaaaaaataaaaaagtagcatgcttatcagaaagtatgtaaatatgaagaattaatttttgctgaatttggcagaagtgatgaaatcaccacataattcagatacagaagattatcaagaagccagaggtctcactcatagcctgaagctataaatgttttatagagtgtatagactcttaatgcaatataaacgcacccgaagtctttctcccaaccctttatcaaagtgatttctgtggattgttacaggtagctgtgactcattcatgttcattgctggggtgtggcccattgcatcactatatcaccatctgtctagggttgggcatggttgcttctgcctataatcctagcaaacaggaggctgaggcagaaggattgctatgagtttgaggcctatcagggctatatcacaagaccctgccctaaaaacaatggagcttgagaatagctcagcatttaaaagcacttgttcttgcagaggacccaggttcaattcccagtatccacttggtagttcacaaccacccataactccaggggatcctctaccttcttctgacctccatgaacaccaagcacacatgttacagccatacatgcaaacagaacatttttacacataaaataaataaacctttaaaacaattaaaaagcaaaatgaataaataatagtagggtttttctttcctgacttggggctgttataaacaatgctgtcttcaatattgttgtacatgttttagtgttggtatatagcacttacgtcgatatatacttagaaaaataattgtttataagaaaagcatatgttgtacatgtgtgttcaagtgtacatgtgaaaggagaggacaagctcagttgtcacttctcaggcaatgttggttatttggggatgcgtgtttatcttgttttgtttttttgtgacaggctctcatactgacttgacatatgcctagtaggccaggctaactagccagtaagccctgggccctagagatccacctgtctctgctctctcccttctaccccaactccccacccatcccggaaaaacatatttttaatttttaggcaataacaccaaagaatttgccgaagtgtatgagaattccagatgctctaccaccattaaaccttgctatggtctggtaaggttttggtctgcttgatttggttggcttttgctgtggtttgggtttgctttggtcattctgtggatgtacagaggcattggtgttctctgtatttcccaaacatctactgacactgaactcatgaaatgttctctttaattattggctactttatcattggctactcatttcttattaagatagaagttatctgtgtacttactcatgaacatacacatttgtataactctgggagatctttggtagagacattgtacaaatacatttctcagcagcagtcttcctataacctgaatggtcatctgatgtgccaaagttctcaattttaatgtaattcaagcctgccagtgttttcctttatagctagtcttcttagcatgccacttaagagaaacttcctagctgcccaagtggaaaagaatttctcctcaaccttctaagaagccgtttaactatgatctttcagagattcttttttgatattgtcagaatcacaggatgttcttttatctttggataataaatgaatccagtaccattttcataatgtactttgttctgtgctatcatagaatagcaaatttattgtaaatagtatttatttttgtgatttttttccagacttgattttttttctaattatgtttgtccagtttgcatgaatacacccttaatacagtattttattgttgttttctttgttttgaggtagtgagtagtataggaggcagccctacgtctatgccttattctagctaagtttgtgttacactctttaaaactatgacccaaatatacatatacatacatacatacatacatacatacatacatacatacatacgctctagcccagtaatcctcttaccttagccttctgagttctgaagctacaggtgtaagacaacaacctggtataaatgtctgtagatctcaaacactctcccttgtcttcaacagtatctctgccagtcctttctctcttcgcttctatacaaactttagaatcagattgacaacttctatacaaaacaaatgaaatgcatcttggagttgaattgagatattactgaattttggtgaagctagaattcttaatggtaatgggtcttcaaatacttaggcttacctttttcttacacattttaaattttatctcagtaatttttcttctattttttgtgcagatattttatactatgcttgtgaaatacagtcataagtacttgatatgttaaaggagaaaaaaagctgttgggtatttttgtatgtttctcaagatacagattatcaggctgtataaatttccttctatcccaatttagtgagctttaattatatataattgttgctttcataaaatgtcaacacatctgtggaagtgatcatgtgatttttctcctttattctatcaatgaaggaaatttcatttattatcttgtcaattgttttgtttgttcgtttttgagacagggtttttctgtgtattcctaaaactcactttgtagaccagactggctttgaactcagattatctgcctatctctaccaccagagtgctgggattaaagtcctaccatcaggctgttttataaattattacacctcccctcttcctgatccaatccccacatccctcctcttttcccatgcccctcctccttttcttcctcttgttcttttcttttttccttcccccccacaacactaggaatttaacctagaacctctcaaatggtaggtaagtactctaccagcaagctatagcttccattttctttgtgacagggtctcactaaattgcctagaatggccttgaacccactccatagctaagtcatcttttaaatttatgagccaccttgtctcagcctcctcaacagccagttattacaggcctgtgccatcaagcctgacttaattattccttttatacatttcaccatttaattcacagattctgtttagaaatattacctctatgttaataagttctagacatggaaacatgtactagtcagcaaaagacatgctggggtgtctaggtcagaattatcatggtgtctgctctgtgatgctggttacctgacttctgaagacgccagtgaacacactgacccttcatagttctaaacagggccacttaactagattgtaattctattcatgtttgtttatctcagcagctctgtaataagcgaggacctgtaggggttcctcatttcagaggggctgtgaggtcaaaaccataattctaaaatagcaacacagagattatcttgcctcttttactctcgttattgcatgagagcatggtaaagaattccaggaactccacagcatatgatattgtatgaagtaactgtcacttattgaatctggcactagagagacttgcaaatacttaacagtaccattctttacactcactgttttgatttaaatcatgtagttaccttaataaaatgtactggtgagctagcatgtaggaactctctccctatggtgagatgctatgctcagtcttaatgcatgggagggagacggtcctgccccaaactattgtgcccttgggagcccttacccaagaggaggagtagattgggggtgggctggggaggggaggggagagtggacaggaggaggggtgagagggaaaactgccgttgaaatgtaaaatgaaattaaaaacaatttttaaaaagtatagtgtttccagctgtttagggtctctcctgagatttttgtgctattgatttcaagtttgataccatttcatacttttcaatggttttaaaccaaggaaagatcagccttgttttcagtgcttgccggagaggaaggtagatctgttgtttatgctggggtgttcaaaagattcagttgggcaagagtgctgttcagagttctactacaggcttgctaatttgctttcatactatcagtacttaaaatataaatgataggctgggcgttggtggcgcatgcctttaatcccagcactcagaaggcagaggtaggtggatctctgtgagttcaaggccagcctggtttccagagtgagtgccaggataggctccaaagctatacagagaaaccctgtctcgaaaaaaaccaaaaaaaaaaaaaaaaaaaaaaaaaaaaaaaggaaaaaaaggcaaaaaaataatgaatgataggaacttgaactatatttgattgctttaataagtttgtaatgttctgttattctgctttatagtttttcacaatatgattggtgcatattcatctagaattgttttcttgacatactaaacttttactatatatatatacatatatatatatatatgtgtgtgtgtgtgtgtgtgtacatatataaatatgtaataaaaataaaatgtactgtccacattaacatgtatggggttcattgctgcattttatagtaatttaataaatactttaaacaacttccagtccttgatttcaacactgataaatagtgaagaaaaaacatacaggaacaaaaactcttgagttctcataaggttgtagcaatatacagggtcctgagagctaatgtttgagaatcattggtttatctggcagaattaagaccatgtgaaaagaatatgatcttgggtgaatcaaatatgcaagataattatttacaaatgatcttgcttagggatcctttaactttaggcaaaaattgaaagcacctgcctggaaactgacacattcagtgaagcatttctaatgtcccccagccccagtgtttagcaggttgtgaagaaaacactctggatatttggatgagcaggggcaagatccatggtgaaattctcatccaattacctggtgcccatagactctgcctaggcattttccattttaattggaaaagtttgcagcttcttgcttatagcacaagggataggaaaccaggcatgcttatgtgaaataaaaatagaagcaactcctcaattttaacttctgcaatgtttcccttgaaatgttgcctacaggcctctccacccaattactctgcaccaggactatctagccactatccacagtgatcaagcttgaaccagactccacagaatatgcagtaactccattccttggcctggaatctaaacacgaggggcacagtatctccatcacattttaaaataattttgaacccattgtcaaaggtaaaaggaaatgatatggccaatcataatgatccattatggagtgaaagtttctctggtaattatgaaaaaagtgataacaaaaaacccaaacaaacaaaaaacaaacaaacaaaaacctaactctattcttttgtctttccataggaaaaaaaaaaaaactcattctgttagaccagatataatagtcaaaaactaaactagctcttccaattaggtcaaagtagcagcaagattcccattaaaatttttaaaaaatccaattattttaaattggaaaagttttacaaatatttttctatctctaatgtgctataccccaagaaatatttgtgttcctaccatattttgcaggcaggaattatctttgagagtctttctgtgtgaattgacccttttgccaagcttgggaccacttttcttgttggagatatactagtgcagatttagatgagataatgtctatgaaattgctttggcctataactttatatactaataatattagtataagtttaagaaaagcctaagggggcaactggagagacagcttgggaattatgaatatttgctgcttgttcagaggaccagagttctgttcccagcacccatgccagctggctcaaaaccagccacttttaacttcaactccaggggactggactcctcttctgtgcccataaacacatatatatacatacatacatacatacatacatacatacatacatacataatacatacatacatacatacaatattttttaaaaaattacttcaaataaaaaaaaactactgaaaaatgccttcctaatcctctctcatccatctgtaccagctcctcactgaatccaaagcctcttttttttcttgactaatgagacatttctagattgacactttcaagtacacatgccacaagcaatcaatctgtagctttctttggttaaagactttcgagtgcttctaattaatccattttggaaagatttctactagggacttcctctaacatgtgttcccttacctgtgtgaatactaaaaacaatcatctataggtaccgcaatagacaaacctttccattaagtatttttcacatcagtgtctgtggggcaatgatacatcctgcagatttaaactttccagttcagaaagccaacagcttctcagggggttaggaaaatgaggaaaaaagcaaagtcaaaccctgacttaacaaactcactgcattttccctttttgttctggagatgctgaacaggtgtgagtggaaaaaataatattcaaagaatataaggataccagatcattatttcattaccaaattaccttcaaagaggttgctaacaactagaacatcaagacaccgtgtgataaaaggataaaacatataaattcacaatttggcaacagaattttgtaaaaatctccgaaaaaaatagtcatgtacttggaggtccttgaacatatcatgttaatttccctgagctttttaaacataactatggtttagaaatgaggaactatctgcatcaatgtgcttccatgttatacatacatatattctgagacaggatctcactactcagtcttggctagcctgggactcactatgctggcctcatactcaaaaaggctggcctgcttctgtctcttgaggactggaatcaaaggtgtaaatcaccatcatacctggcagttatgtaatcctagatgtctcaattcctgacagtattactacaaaatgaaggcatgcaaaggacaaagtggagaatacgtcttacgtattctggcatcatcagcaaacacttctttaaaagctagctcctgggaagatggaggaggaagggaaggtggagaggagaatgaattggtgtacattagggacacagatatcttagggtggtgacagtttctatccctaagtacctcatgctttgaaagaaaagaccctgtcctgtgggaaagggttagataagggtggaatttcaagtgtcacttctttcttctcttaagtacctttgttccatgaagaaaagaacctggcagattccagggaagctcttgtgagggactgtcctcacagccaagcagctgctaccttaggagtgtcagaccaaaggatccccagagctgggcttattgactgtttatggtccttcctgggggagtggggagggtcagagaccctcaactgagtacccagttgcccctaacacgggttgtatgccactctgccttagataggaagggggagcttcctctatgccactgcagggaagttatgaggaaacctgcatcttagatggataaaggctttccaggtgtaacctgtttgggatgcagggatgggtggacaattcacacccctgtatataacccttcacctgtgtgctctaagtaatcccaatatactcattggttccagagtgaactttagcagaatcatcccttggtctgtcattgagaacttcgatattgtttttggttccccttaggaaggaattttagcaacagaagtaaatgatgtgtgacctgcccagaactgtccatcttccatgatttcccacaacagtgaaatcatagttctgttccacatcacttcatctgtctatgaaacttgatcatactaggacatagctgcatgtatgtgtttatttatttatttttaatttgtttatttttattccatgagcattagtgttttgcctgcatacatgtccatgtgaagatgtcaggtctcctggaacttgagccacagatagatgtgagctgccatgtaggtgctgagaattaaacccggttcctctggaagagcagttggcactcccaatcactgagccatctctccagtcccttatttttagtttttattggtttttggagacagggtttctctgtgtaacagtcctatctgtccttgaacttgctctgtggaaaaggctgatctccacctcacagagattggcctgcctctgcctcccaagtgctgggattaaaggcacgcactgctgtcgcccacttttccgtcctatctcttgataatgttgctagaacaattccagagcacataatagctgaccattgcccatgctgtttgggtgaagctaagggaatcaattgcatattcactgggcagaaatggtagaattagggctgaagaaagtatcctgaggtagaacattgattacttagagtattgaaaaaataaataagttgaaaataactggcagtgggcttctcactgttgcaggagttacaaatacagaaagagcagacgtattacccctggagtgtccagtactgcagaactggaatgagaagtatcaatatggagtcacaatttttaaacaaacacaaacagaattaaatctgtaagtgtgcttgtagacatctgcgcccacacagatcgcttctagtactatctgcaaagatgacctcaatacaacagcatggagatagtcaagggattcagtccttggtttctaaataaaggaagtcaagtgcattggggaagcagctgaatccagtgagtacacagaaacaagatgagcttagaacaacttatgccagaaagcaagaaaatatttaaaaagttaacagaagccaaaaggccatatggttaaattaaaacaccttcatttgacaaaatataggaaactctaactttgaaatataataataataataataataataataataatacattgagtgttattttcttttctgttgcaatggtaaaacaccatgaccagtgcaattcatataaggaagggtttacttgggcttctggttccaggagatgagggtatgacatggcaggaaaacatggcaacaagcagcaggcttaaccgggatactgagagctcacatcctgaaccacaagcaagaagcagagggaacaaacagggagtggcacatagtttagaaacctcaaagactgcctttcccctgcacctagtaacatacttcctccagcaagaccacacctccaaaacctacccaaacagcactaccaacctgtctatgggggcgttttcattcaagccaagagatggtctctatcgtcttagttagggctactagtactgtggcaaaacaccacaatcaaaaagcaagttggggaggaaaggatttatttggcttgcaattcaacattgctgttcatcactgaaggaagtcaggacaggaacacaagcagggcgggatcctggaggcagctgatgcagaagccatggtggggtgctgcttcccatggcttgctcagcccatcttcttatagaacccaggaccagcagtccagggatggcaccatccaccatgggctgggtcctcccccattgatcactaaatgagaaaatgctgtaagagctgatatcattaaggcatttcctcaactggggaactgtcaagttgacacacaaaaccagccagtacagatatatggatggaagatgattaatagatagtgttatatatagatggtagagagataagtgatatctagctctacctaccaaattgtatcacgtgaaacaaataataaaaaaatatttgtacaaaatcaccattttccaaacattaccttaacaagtttttaaagtcatttatggtagcagagacttttaatcccagcactcagtatacaaaggtgagtttgaggcctgcctagtctatacagacagtcccagatcagtcagggatatacagtgaaaccttatctcaaaaaaattgtgtatatatatatattaaaaataataaatgtatatatatatattaaaaataataagatatataataaatatataaatttaaatataaaatatatataaaaggcccatcaaagatgataagacttacaggtaaaattttgataaaaaacaaaatatttactcagtgttaaactattcccagaaatcacttaatttcttattaattaatagttgcaaaacaaactgtgaataattttacagtgtaggaacctggaaagtacctttctaaactgactgctgagacttaaacagcatctaacctgtagcacattgacatctcatacttgcagaaaatatcttgtgctgataaattgtttatgatttaataaagcttgcccgaagatcagaaagcaaagctagccatagccattgaggccagacagtagtgatgcacccctttaatctcaatactcaggagacagaggcagatgaatgtgagttcaaggccaccctgggctgcatgagagtgaatcagtctaaaagagaaaacagagctcatgcctttaatgtcagcactagagagaatataaggagcacagtgcagtctcagtgagtctgagcagcagtgcaattgggaacggtgtgagactcggtggattgacccttcggtctgagcattggtagaagtaaaaactctctagtggctggctgctttgcttatctgatcttcagcttggaccccaatatctgtctctgggtctgtattatttgtgctacaatatttactgaggaacacatagtaattctatcatacttttgccaaaatgcataagtatcttaagtaaacataagtatctcaagtaaaacatgaaatttaatctaaatttggggatattctttttaggactatttataggaactttagggataaaaattaagacataattggcctgtaattttcaagaatatcaaggtcatagaggcaagaaaaaactggaattttccattattgaagaagactgaagaaccatgttggctaaacgcagcctgtgggcttctattggattctgtggtccccagaacctttttattgggaaactgataaaaatcgaatgagattcaaatgtgttaaatggcaatattccttggttttaaaggattatctgggatttcgtaagggagtgacttcaggattaggaaataatgtgtttttggaagtaatgaaatagcacagctaaaatgtagtttatttagcttcagaaaaatagcaagattgtatacatctttatacatgtgcatatgagaaagaaaaagatagaaacaaaattataaaacatgttctgggatagggatgtagcttagtttatacagtccttgactaagcgggcaaggttgtggacaactcccaccccagtccttgggagggggaagacagatagatcagaagttcagggtcattctcagctgtgcagcaggtttgaggtcaacctgagaaacatgaggtcctatcacataatatgcacatgatatgtacatgattgtccttgtaacagtgtcgagaagtgggggccttaagaggtgatacaaccttaagatagtaaacaccttatcctctgggctggattagttactgatagatcgaggcgtcataaagctaagcacctctcatgcctgaggcgcccctacacacttgcttgtccttctggttttctacctttatggtgtggcacaagtgatctcaccaggtgtagccatgtgatattgaacttagtgcctagatccataaatgtctatgctttataagctccattgaattaggatatatgttatgccagaggtctgtaattcattttgtatggttttaaagttttaaattcaaaatcatttcaaagtaagaatgaatgcaaaactttaattttctccagtactggataaaagagcaagaaaacacgatttaaaaaaaaatgtaaacacacacaagaaacaatggctcagagagctgaccaaaaaataattcagggttatagcaaactaaaacaagataaaaaaaaaaaaaacttgtcaaaaacacttgtctgtttcacactgctttatctcccaagagatgggtctcaaaatttgagttccaaatttatatgcacttttctctatttcagtgtattgattcccagttccttggagaattattttggcagattcgtccttttctaatatttcttagcgaggccaccttccaaatgttctgcctaaagttttataaatgtccccagcgaggcacatatatctcctctaagtgagaaaatagagatatttttaaatttctagaaaattcttagacaacacctagtattaacttgagatattgtggctgaaattttcttctcctactagcatctgggcttaaatgtagtattaaataagggctttattggcattggttgataggaagacaggaaatttgcaaacaatcccagctttctccatgatcatctctaattctgcatatcatgcttcatggtttaagtctgagactttcttaaactcttactaagaaagcaaacattggtctcagtatttatctaagttatgaattacaataatcaactctgtcattatcttctatcatttaacattcttcaaaacagctgtgtttgaggaatttaaattttttcttccaaaggaaatactgagttggaaagataaaacaattgaatccaggtagaatggggtgagtcaatgtaatgtcagatcacagtatatttgaccttaagtaactctatgaagcaggtactaagattgtgttcattttctaagtgggttccaacaagaacagttgattgtcaaattctcagagtaaataaaaggtgagctaagttccaaatccagacagatacatccatccctcttacaccaacagactttaagaactcccagtctttttcccccctctttcatgaatcattagagtcccccaagttcaccagcacccagaaggtgaatggaaaagaattctaattccatttgctgttgcaattcgtatctgcagatctatctgacatacagtgggactgtggagaaaggattacagacaggaaaagtggaccttctctgtgctgtgtgtgatggtggggaaaagacatacataaagacagtgacagtgactcataggtgagctagctctggtactcacctcaaagaggatgatccattgcagtacaaagaggggatgctattctgtgtctcagtgctgggaagataaacactcaattgttggatggacagaaacacagatgaaggtgttctcagcttaactaagtgcatctctcttttaacattgcacccaatgaagaggccactgaaaaaaaaaaaaaaaaaaaaaaaaaaaaaaaaagatgcacccgagacccctgaggggaaggcagtcaacttaccatgtccataatagaagatgggtcagcttcaggacctgtgtggcctgagggatgggagtggttggcatcacagcatccagctctgagaggaacagtctgatcaaaaactgcagcccaggtgggcagagctaccacagtgtgaagtcaccttggggcaatcccaagcccttgggagtaagttatctctgttcaaggggtctttggcttaaacatagaatctttaagttacacattttcagaggcacattacctaggcacccaaggatgcttgagttagcactaatgaagaagctaatctgtttctaataagaatctatttgctttctattattgcatttttaagagtgtccgcttttcctctgtaagtttctgcaataaaagatgagccaggggaaaactaactatgattatgtgcattttcctgaccacacaatcattcgagtgttaaactgacaagcccctgtcattcaccttgctcttctcacacactggtagaagcttgttcaggtgtttgaacaggtctgctctacacggccattcccgcactcattcacttggcaaacatttgtggaaggagctttgtggcaagtctttcaaaaatacaataaagcaagcaaagactccctcctcttgaattagactaggaaacaatgagaggagaagaagacctgggctggaggaaggtcatataggaaagtagaaaggagaccactgggagtagaaaggcaccagggaaggtatggagggagggggacaacagaaagaattgcttgaagcaagcttctttaaagctaataaaaaaaatcttttaaaattatctttttaagcaaagattcccatggagatcagtgctgggaggagtcagtgcttaataagttgcttattaattaattttcggtggagaaaagaagaacgaaaggagtcagcaataatggcaggcaagggctaaccagcaggctggagtccagagtgacaagagcttcagggttttgtcataggaaccagtccaaatactgtcatccaacctgttcccaggctgcttccaaatgcattgccaagaagtcaccattaaacttgtgtagacgaaaatttcaagtgggaataatttaacgggaatgatttaaattattaattggatcatatagccttgcatttgaaggcacaattgagtggtttgatagagagctctgaagttgtaaaagaggaaaagtcctattagaaaactcatcccatggataatggaattaagatttaagatttaagtgatcaagtttcaaatcacagggccaataagtgccataaggaaaattgaaatagttgtatcaaaacattattttgtaaacaaaattttcaatttttatgtaacaagtttacttttctgtttgctgtttagttctcattcgtcattcctatactgctgccaattctctgagtccttccctgccttgctcctcagatattgtgtgtgtgtgtgtgtgtgtgtgtgtgtgtgtgtgtctgtctgtctgtctgtctgtctgtctgtctgtctgtctgtcctcaggagtttctttttgcaagtacaaaactatgcacagtatgtaatctttttgaaacacaacagggaccttcaaactctgctctatactttcaggagaaaccccttgcccacggagaaactccatcactatcttgctttgacgtcacactaacagcgatcttcttgctttctggagactagcactggagaacctggccctttggttgggccttcagctgaaaaagatacatttttaactccacatcctcccatatgtttctccttgctctctttcaaataaatggcctctgcttccattaattgctgttacacacattaaatatatgtatatttatatgcatagattcctacatataacctgctcggtcggtataatgttgcctctctttatgttttcctggattgtttgaccgcaggtaacaaaatctgacttacagtctcaaagaaataggcacttcagtcttgtcttaaaagctcggaggtaggagtgagctgtctctgactcagccatcagtggtgagtgagtcacggacctgggtctggatttctcttgcagccattgttccaagtaagcgatctttctctctgttgcttcccgactctaaaaggctaatgcgcttttaggcactatctacatcggaagagtgtaggagtggatgaaaagatcagttcctccagcatctctacatcattcaggagggaaaaagcttacttccagtcctccggttacaccgaatcacatgacagatcctaaaccaatcactgcataaaaatcagccagcctcaggcacttgaaagcgaatctctccctccaagagacccaggtacttctcccagagcaaatcaggagtgcttcagaagggacgaaatctgcagtaattactgcttgggtatcagccactaactcctaaaactccctggggaattgtgtttactgtgtccactgttagcagcttgtatactgtgagatccccgagttttgttagctgtgatatgtatgtcctcttacaatccacaccagtgtctcgttagtgtcttagccagatttatagcactcttaacacacacatgagccagtcaatttaggaggagtcaccctggccacagcttcagaggttctgctccaagctgagggatgctgctttggttttgcgttgaggcatattacagtaggattgcggtggtggcccaaactgctcaccctagggcatcctggaatcaaagttgtggaagaagggataggaccccaaggtccttctggagcactctctcatttagcataacacatgacttgggaactaacaagtgggactgtaggggacacttatctcaaaccacatcaactacatacttttgttttagtatatacttttaaggacatagatattaaaatactaagaggaaaattacatgaaataaaattaggaaatggaggtaagtagtatctgataccacatgtgagatgaagccaggaacaccaggctctcaaactggctatattaagattatttcaaaatataaacttagcagactataaataagtgatgtattacaattatcccaaaggctactctatatacataccatatatcctatatatgcatgtgtatatatgtaagtgtgtacacacacacacacacacacacacacacacacacacacacatacacacacacgcacatgggattggtattgaaggagaccttcctcaagcaactctgtaacattatttagctcccttcttattaatatttaccaattacaaagaagaaaagaacaatctcaaagcagagacacctagtagataaccccttagtcaaggggtcaaagttaatatcaccaataatgagacaaattgaagtcacatgctgctggatagactgcaaagaaaagactgtcttgctaaatgtgaataacctgcacctaatcatgaagaaacaatacaatcctaaattcggggcaggctacaaattgcctagtctcagtcatcttaagtgtgaaggtcaaacgggctaagaagacaagcttgtcaacaacctgagcaaggacactgatactcagtggcaactaaatgccatgcctgataaaagaaagaactgtaacaagatcataaaacttaacaagggtcttgggattatatgggaagaatgttctggtaacatttcctgatggtgatatgtgtttgtttcagtgtcatatgggagaatgcctttttaaaggaaaatacatgccaatgtgttcaaaggtgatataataagagcttactttcaagtaactcaaagggagaaatatgcttttcattacttttaacaaattttccatgagcttgagaccattccaaaacaaacaaaccaaaaatatattccttttccataacttgatagacagccatgccaattcttagtaatgtctaaatagtattcttcagtgtggtggtaactagttgtctatggatggcattgggttgctctcagtcttgtgcagtcataacctgtgcagcaactgggtatctaggaccctgtgctatttttcgcatgtcctcctttataaggtaaatatgcacagacaggaatcacttcaactaattgttaatgaaccactgctatgatgttgaaacttgatcctcagtgcagctgtttggaggcacgcctaatttgagatgtctgggtcacaggacactgccctctgtaggtagttagtaccctattataggagtatttgtggtctggggagtggcttccctataaaacgacaagtcaccctccctttatttccttgtcctaccataaaacgactacaatataggccccggccaagttgtcgttgccatgtggttttggagtttcccatccccagacccaacaatcaatacatttctgataatcatatattctggtctctagtattctgctatagcagtgagaaatattaagacacaggcaatgttccaagataaatagcacaaaatgcaatagggtaaaattcactggcaagacttttaggatgaccgatttggttgaacaatatctccattcattgatacatcaaatctttttttgttcactactctatagcaaactctgcatttattctgggaatataactgaatgaaaatgaagaaatgactactccaaggtaggtcgagaagggttttgttgtagatacaagggagagttcagccagaggcatctgggaggggccaggctgaaaccaggccttgaaaggagagataagaagagcaagagaggaagaggaaagagacaggagaaagggcaagtggactaagagaggagccatggaccaaggggccaagagcaagccaaaagccaagtgaacacatggacaaaatgtctagtttatatagcaatcagaatctgggggaagagaagcaaagggcagccactggactagggaggtttaggatagaggatggggaggacccatgggtattgagtgacactatcttgggtttcttagggatctgacaatactgtaaccctaacggggatgcaaaagcttatgaaatcaagcaggctggaatgaattaatgtaatgttttccaatttaaagtatgtcttaacactgatgattttttaatggaggtaaaaaatgtaatagtctttttccacatttttcaaatgcggaaactcttgaaaagtagataccgtagtaaataggcagccctctgtgtggctattaacactgactttactgttgtggcgctcatttcccaccagcctaggctacaatttgccacagggattcctagatttaaactttgtcaccagggtcctgaacaaggatactattctgtcttttaaaaaacaaaatgtatttttttcaagtttcttttccccacatatcttccaaaaataattcagaagcaaaaacattcataaaaatatttcagacataagtggaggccactgaagacactcactccaggaaattgatacttagagagctgacaaattgctcaaatggccttttatggatattgataccagctgtgcagaggaagctctccaccaagaatttgtcaagaagagctacaaaataaacaactgcaaatctcagtgtatccctactcagagtagttaaggaataaataataacaaacaattaggacccattagaaggaaacaaaatctcttaaggtcaggaaaataattcttcgaaatcaaggccctttgggttggagtcagagctgcctgtcagccaagttcacaggccagctatcattttcacagaggcagggaagtgtctcagatagtgtggatgggagccaggtgatagccttaccttccagttatggtaacttagagtggaagccataagtcactggctgtggtgattttgattcgggtctgggtaaaaagtcagcataagattccataacagagctaagattaagaactgagaagtcagaatcaaaggtgatgacacctggtcagtttgcagcactttgccattttttacaggagggatcatggatagttaatattttcattaaagtcccagtggagccaggcatcttccaccacacctgtctccaaacctcatttattacataagactttaggggaaaaaagccaccttgtttcgcaccagtgttcctttggactggaactccatttccctcatgatgagctccaggataacatccaccaagcttgttcttgctcagccctggcatgtgcttgtgagactgtagacctgtgtgcattaggtgtgagaggaggaagtcaggcttggaggcaagcagaaaatggcagatgaggctgaagctgatgatgtcctttggggccaggttgacaaggctgctatacaaaagagtaaccctaacctctttttcctccctccctccctccctccctccctccctccctccctccctccctcccttcttccctctctttctttctctctcttcttgggttgaatccagggctttgaacatgccaggtaaatactataccactaagatatactcacccaaaactgggctaaatctaaaagcccaaagtatgctttcatagaagagaggcagggtctgatatttttatttaggaatataatctgctatgataaggaccaagtagagagagtagcaaagccacagattcaaatagaacctgcctgatggagtaataattttcctgtgacctttcttctcctctgtcttgtaggtgaacccagtgagggtgttttcagcaggaatctggaaactgaggaagcaataaggaatgaatgtcaaggtctctggggtatgcatctggctgtgacagcctggcttctccccagggttctagctctgcctctttccctccctagaagagaagtcaaagggtgaccctagcatattctaatttatcatattagagagtggagggagaattgaagagtcagatgaagaaggagcatactgataagggcagttaccacttgcacatctggactctgccagagactttcccgtttctaagttcctcaattttgtcctgcagttatccactgggaggtttattaagccatagactaggtagttctaattgtgctatcagctagggatgtggccaataatttgcatttttaacaagatcccttgggagtctgtgctgctggtccttgggacagcctttgaaaggcattgccctaatttattttatcttatcttcccaataacctggcacaatggtatggttacaacaaaattgcaaactgtcgaaaaattagagaattaagtacactgccctcttccctatggcagctagtaaactggaaacaccctggattccacttgctgtcaggagagaaagcccatgcttccccacggttcctcttcttccacagctaagacatcatggagacaacagagctaaagctctgaagctttagcttcccatcatccactttgcctgcagcactaagggcaacttgcacttaatggcccttcctggcattcagtgttgccttttctctagtaacgttgccttttcatcatttcaatgccttgagctacagtcctgaaggctttccagatacttactgcatgtgcatttgctctgacacttcctctaacatgtatttggaaggaaatagagtgtgtgaaagggtgagcctcgagttcaccatccgtatggtaggctgtctccagtgagccccagcctcccaggcttgcatgcttccccaggtagtatgggcgagtgcacagcgagctactccactgttcttgggtctttccattttttcataaacatgtccatgggctgaggatgtcctgcccaaccccacttctcactgtggatcatctgagtgtcatcacttgactgctttgttgtccactttccaatgtacagagaggaaaagaatcctcctgaaccttccttttttggttttgaatttttgtttttacttttaattgacagtaattacacatattcaaggttacaatgtgacattttgatatatgttcaatgcaggatatagtcaaggtctagactgtagcttgtgcatggaattctctggaacagatagatgggcaagcagtgctcacctctggggaaaactctaagcagctggagcacatgatggaatcattactttgctgtctatctcctttgatagttttacagtttttgccacatgctcatgttacctgcacttcacatttaagaaaatatataacttaaaatatttaaacgtttaaaaacataattggttctgttttggatcaatatactagagatatcaggtatctcagagaattccaaggtcaaactcctgtacttaaatggtggaaccaaacattactcaaagttataggataaagtagtatactatagagtagagcatggtgtcgcatgcctttaaaccagcactccggaggcagaaacaggcagatctctgagttcaaggccagcctggtctacagactagggcttaatagagaaactctgtctcaaaaaaccaataataataatagtaaaaaagtagtgacttattatataatgagaaagggggtctgggttgcaatctgatgctctcatatgacaggcagccatatgaagactaaaaccttttctcatagtgtcattgtaatataatgacatttaccaaagagctaaacacacacacacacacacacacacacacacacacacagagagagagagagagagagagagagagagagagagagagagagaggtctgatggtaactgaaaagtaagtagacaaaaataaaaaaaatcaggtatgcatcaagacattatatgtgtctggaggaaaaaagtggtatacagtgaaaaaaataaatatttaaaatcttgaaacagttttaatggtagatgcatagacaatatgcacatgcttgtaggtaaattaaaaacataacacaataatattgagattgattccctacaaggttgcactggtgtaaagaagcataaacaagaactgctttgtgttttacaatgacatgacaataggagatgtcagatgtgcagttttaagttgagcatgtaagtagtaccagtacaggggacctctcaggtgggttcagggacagatcatcttaagccatcatcttagtgaaatcataaaagacaataaaacaagaggctcagaaaacaaatcaaccttaactgctatgaactatgaggaaactgggcctgcttagtctttagttgccgctgagacagaaaaactcaaaagtaatgcaggagagtgtccagagcacctttgcagctcagcacctatctgatcagcacagtgtcctgaagatgaatctagaaagagttgtttagggaaggagatgggccataccttagtgtctccaagatgacaggtctcagataaacttgtccttaatatctccagggagggggggcttggggagtagggtgtgaaaaggacatatcctactacttccttgaggtgctgaaagaaaaaaaatgacatcattgtgttgggtatatggtaaatgctcagtaaatgctattgttaaaacatgcattattgcacacaaaatgagattcaaatatttatgctatataatttaagtaccatcacagttagatctccagtcttaaggttcacaatctagacctcttagcaacatgctgctctgtttgttttcatgcattatgactttaaactgaaccttttttcaataaagtttattatatattcttatacataaacaatatttttgcacacaggtgacatataacttccagatatttccataatctgtacacacaatgtaacacaaaaacagatttttcttttaaagcacaaagcctccacagtttctttgagtttcattctgtcatttgactgcattagatttctgatgttcaatttgcactgagtacattatggacttctctagggaatggaatattttaagcaaatgtaaaatgctttgataaatcaaaacatgtgagtgaaatttcttaaaaatatcccaatctgttttgagacttgaaataaagtttggtctttaacaaaataaaacctattaacctaaaacagcaacagaatttttttgagaagtaatgcataaggcatattttaaagggttaattagataaactacaaagagaaacttgccataagctaattgtaaagaaaccagaagctgttaaagtctatgctataaaattcaagttggcaacatttttaaattgcttgggatccatatgtaactgtgatattctaaattgtcaatggcatcttttatgattaaaagccaatcatctaaatattatgtgttacattgataatagcagagaccttgattggaccattcatagccgcatttcccactagactagcatttccaactagactagcatttccctatgtgttgatctgagtaagaatggccccataagctcatgtttgaatgtttggtccacagttagtggaactgtttgggaagaattaggaaatatggccttgttgaagaggtgtgtcactggaagtgggctttatgatttcaaagaccatgccgggtccagtttcactttgtaactgttacctgcagatcaggctgtagctcccagcagtatctctagcattacacctgcttgtctgccaccacaatccccgccatgatgaccatggactagctctctgagagtgtatgcaaggcctcaattaaatgttttcttctgtcagttgccttggtcatggtgtctcttcacagcaataaaataataaatagaataacatactaggtcacaataaatataaattttaatttagttttattgattattatatgagtatgcatgtgtgtgcccatgttacagtgtatgtggagtcagaaatcaactttcaagcatcagttctctccttccactgtggattacaggaattgaattccaatcatctgacttatccaaaaatgattttacccactgagccatcttgctggcccataagctattttcaaatgaatgaacaatgtgtctatatattcagtgattttacaaacctcaatagcaacaattctaaatgcaaaaaacataaccttaggggaagaataggcttgtgagcttccaagtttggttcaggtcaaagagcaatggaagagagatcttaactcagctaatgagccagctcaaagtggaaagtcacatggccttgccattgaaaaatctctaggtttctgttttctcacagctaaaataacccatgggagtgaatgattctaaagatcctactaatgctaaaattgtatggtgatcaaaatataaaaccccacatcaaagcactgagtatattttcactcatttttaattgagatggaaacagaagcttgtaactaaataactatcaaaattggcagtatggcagtgactgttgggtttcctccaaaatctgtacttctttcttcctatgcacacaactaagctatgttttgctttgtagcaaagtgcatgttctagggaagggatgcaaggacatgaactgtggctcataaaatctctcatttgtattcctccaacctctggcttttccagctgtctcaatgaatgaccccaccatcacatactcagttattatagaagccaagtgttgaacataataagcttcatcaacctgaatttcccaaacaatcatgtagaagaacatctctaatattccacaaaagtagtagataacactccacaggttcctcattttactgcacattttatgagcacaaacaataaatgccttggtccaagactatctctccaaagacatttgtatagtgaacaaccctgaagtgaaagtatccctcagaagtaaaggagaaattcgtttattgcccagtaaaataaagataatgttttcttctggggcaaagggtggatttggttgtcctaagtgcaaagatccacagctccaattcaaactgactccatgaacagcctttaacaggaatggcatatcaaaaggtcttgaggatcaagagctgatgaaaacactagtctctcacacaacaattctgtgtcttccagctcccatgagcttggaatcagttaacccatgagctcttgggtaagagaaatccccaacattcacagttcttggcattcctccctctcccaagtcagaaacagcaaagaggagaatgaaggaatcactgtattttggtcatcttttataaacagtgcagcagtagttatattccagttttaaagaaaacacaataggatattagagtaatatgcttcggcagccaaataaagaggtgaaaaattaaagactttaagtctctcaaatgagattgttaaaattgaacacatccctccctcctccaaaatcaaagggcactgctttggtctgcataggtgttctttcctcagttgttgaaatttaatctatcctcagtgcaatgatattaagaggtgaggatttgaagagtgactaagtcctgagggaggactcggctctgataaatgggaatggtgagtttaggattgaagtgagggagtctgttgggcccctttctttttaccctttgtccaggtaaagacaccgcagcaaagtacagtcttggaagcagagatccgtcaccaaaatcatgcccagatgatgtgaacaccctgatccacagagccctcaccaaacactggatcttcaggtgccttgatcttgaacttgtcaacttgtagggcttcaagaaacaagttcccacctgtgataatcaccaagcccaaggtattacccataatggactaaggcaggcacaaacaatttataaaatatgagtgaaaatgatgtctcgggtccagatgagttgtaatactgtttcacaatctcattctccctccctagaatcaaaatgccgattagtgtattcatgattctgaaaaagcctgatgtcaactatttgcattatttctccagcagcatttttaaaactttttcaatgtaacccaagcaacatcctgtgaaatgagaacagagtgcaacacatagcggaagaatgcagggttggatgatgtctgaaatgcctctataattcaaatgtctaaaatatgtaagcagtgttaacttcttaaacaaataaagctatgaacaggtcatctggtgatctagataaaatgcacacagggtctagtattctgtatttgtacctaattcccaggtgatatcaacacactgctccacagaacattctttgagcagcaagggtcttgacagtataagatctggaaaaataatagttacagtcttggtgatggtttaaaattatttaatacatttgtagataaagatgtgttgctgcaaatattttttgttgttgttttttaagggatggggagtgagacagggtttcactttgtagcccaggctgttctggaattcagttcatagcccagactgagctcagttttacaatactctttctgcctctgcctcctacgtgctggagttgtaggtgtgagccaccacatgcttcaaacacagttcaattatatatttaaagaaacatctctaccagacaatgtgggggtgatttcagaatttctcagtactgcttaataaattctggagcattttgacttagtagaaaactgcttagatttagtgtaggattctccacctccttgcaatgaatttccccatgagaagaggaacaggtaaggtaagatactaatatgaggggctgagagatggcttggtgattaagagcactggctgctcttccagaggatctcaattcaattttcagtaaccatatggtggttcacaaccatctataatgggatctgattccttcttctggcatgcaaacatacatgcagacaaagtactcacacatgtagggggaaaaagacactaatgtgagtgaacttgtgaacctgcccccattgaggggctgcttaaatggttccacatatgctcagagctacaaaatgactaaaagctgttttcgccaaaagaaaaacttttctttttcttttgttttctcctaacttagatttgaactcctgtggccctggttgcaaggatcatctctcctgctttgttctcaatgttctgtggcagaatgttttccatgtaatagaaggcatatgagatcatgtagaaaggttacaaggagatgagctttcccaaagaataaaaacttaatatcaacgaagtgacttccaacaatgaaaatgaagggaagtctggcatgtgctaattaaggagtttgagatgtgtgaatttgtttccaattatgagatctgagtccaataatgaattctttgaacctgtttccagagtaacatatttggtcccagaataaaatttcataccaatccttaaacaaaaataatttgcaacctttatgacatatgagagggaagtgtcaaaggtaccctgcatggtcttaatgggggaaaaaatagcacatttaaacttataaacatcaaggaaaattcacaatatagcgtgtgaaataaaaatgaaaggaaatgtatctttctctaattttaaatgtgatggttagcatgagggtcacaaattcaagagtgaatttccccttcactcacatttctgttaatgttttttccagtagtggcagaaatgtattcaagtcaaacatcatagttcttgctaatgtaccttcagaaatagtattagttttgtcagaggaacttggaacaatgccatgtttgttagaagtttttgttgcttttgtttgtttaatgtattagaatggaagaaaagttgattggtcagaattttgtcatgatgtataagactaagctagacatagtgagtagatagtaagtgtaggagaaaacatatggcatgcccagagtaaacaattgagagtttaatagattatacaaagtgagcacagtttagagaaaccagcaagggataatgcagttccacaggagaggaacttggttgtagaaagctgttgacataaaagttgctgtggcacctgagttgggatgatcaatgggaagaaccaccaaaggcataggtgtagctcatgaatagtatctggacaaagtgagactaaggaatgggtgccccacctacaaagctctagtaaattctaattatagatcgaaaccaaagcccacacttgtttggtgaaggtcagcctcccggcccagagaagggctggagaggggtgggatgatgaagtagaagaacacttgtatgagaagcagagcaatgtgtgcaacagtgcaggaaggtagctatgtctctgcacacagttcacaagactctcgggtcaaggacttcaggctaatgcaagtgaacagaaaactgctcattgcacatttcattctccttatgtatgggagtgcccattctgtgtttgcttggccaaagtaaaatgatctaaagcacccttcattcacatctgcattcaaatctagggccaagggtcttaaaaatgagacggatcttatcagattatgacttaaaaatctgtcccaaacatattttcttattgcatatttttatgtattatatgtatgattaatcaatcatccttagtctccatagtaacatcccccacacacataattcccttttgtgtgatgatgttaatgattataactgccaaatgtgaaatgtgcactctgggtagaagatcctaagacgcatgcactattattgtctcctttttaacactatatggacaaaaagcttaggcgaaagtcagtccattggcttctgcaaattgtattgccaaaaatgattgatagtttggagttagtctacaaagaccagaattttaaatactctactgcctttctctttggaaatatattttattttactattgggaaagacaactgatagccttcaaactttttcttggaaggtagtcaataaaacataaaactgtcaatgacagaggaaaacaaaacaaaagtcactgcaaacaagatgaactgagcagagatggtaagcaaggaaggttctagactaagttcagcacacttttagttcctgtccctcatgaatacttgttgtgggatatttgtataccgtatggaaataaatatttgtacactgtgtggaaatgtattgctatgactggcataataagaagctgaatgtccaatttttaggcagaaggtataggtggggcttccaggcagagagagaagggaagagtaatctaagcatttgagagagatgtgaggagacacagaggtagcaagatggctggtatgtgacagaatttagatgaataaaaatgggttaatttacattaaaaagttaattaaaaacaagcctatgctaagaccaagctttcatagttaataagtctcctttgttatttgggagttggctggagggacagagaaaaactcattacaaatactctctgctttgggtctttccatttgatatttgagtatttgccattccttatacttaatgttgctacaaatagttaaaatacaagcaatttgatgtatctgtgttaatgctccatatttaaagatctaacataatagcattgttattcttattattatcatattaagaagtatgatgtgaatatagccattgtatcagtcagtgcatcctgattgttagttaacgctaatatgttaaggagatttttataaaacattatgaccaaacacaaagttttttttgtattactatatgtcaatgcttaacacataaatacataaataatacttgtcactcttctttggaatatatcatacccaaaccagcctgccgaacagaacaagatgcttctctatctatgaactcagtggcttatttctctacttatttgatgataaatcaaataatatgtaaaaatagaatatttcagtcagttaatgaatgattcattaatttttggacaaaaaggttgatgatgaaattaaaatacttctgcaaatgacaaattgaggttaaaagttaaaactaacgacccatcatatccatcagcatgaagatggagaagttgttataaacttcctaaaacattggctgcttcatagtttaatcatctagcagaagagataaagaagaatttactgcctcatagttcaactgatttctctgtggcagtatggcaatctccactggaatagatatggggactgtagcctaatgggatcaatcttgttatggctctcatctttgctacatactaaaagagacttcatttactccagatctggactttggaagtaactctctgtagtgatcactgttgtagctatctctctggcatctcccgtctttacttctcaggtttcaatattttcaatgtcctttctggacttctcgtatcccagtctttgatcatgctgtttgagatgactcatgtgatctctacttatactactaaagcactgaaataccttggccatgctgactggtcagagatcagtctgagcagtgcctaggcatatgagctaggcagctcatcaacagaattgcatctgtttgtgcttgttgattgatctggaggttggtacaaatccaaactaatcacagggctgattataagtcttgggtatgtgttaaaacataagaatatttgcttctaacatggctggcactaattatgatataatcaatctttgaactaaagggaactcacacagagtttaagaatgaagtccaggaatataatggacataaatcagagaatctgattagaggccctggtcaaatcttctctggagatataagcaagaaaattttaaggcaccagtaattttttttcttctgtgtgcttaaattagttggaagtagttttattttttatatctgcaaataagaaagttctagataatgcatttcctaactccatctagtgtcactttcttgttctagaaaaatctctctatcgatttccctttagctctagcactgttgtgttaaagaaaattgaacaataaatctctggtgtttagcttgaagaccacaatctgttctctgccttaacttggctgcatctgacttgtggtgtagcaacgtgaagctggttgagagagaggagaaaggagcttaagaggggaagtggtcaagatttgtagtatgcttgggaaaaaggaagacagatttggtggctaagaataggatactgcaatcatttctaaaaccagaagtaaaataagtaggaaatattagagacacaaagcaaatatttcagaggcatcattcttggaaaccattgcagctcaattgtaagtttccctccatcctttggctcttgaacctggtggtaggtggtatacagagagctagccatgtggttaggccaccagagctcatgtcagagaaaacaggttaaaccctacctggtgagaaaatgtagaccgcaatcaaacacactaaccctgttgatatttacccaagaaaatagggttgagcccacaagccctccattagttttaattgaaggaagctgaagttggaacactaggtagcagctgtcaggaggggccacccaccttccactccaggttaagattgaatgctttggcctggagaccagcttagatctggtgttaagtttaccactaactatttgtatgatcataagcaaatgcttatatactctgttcttttcatccacaaattagttctttccttaggatataagtatgagaattaattgacaaatgaatgcccagtgcttggcacaaaacatacagtaaatgcttttcaccctaccctgcatcactacattgggatcagctggatataccttttctggatattcacagtgctttcaatatctatgtggtcttttttgttcctttatgtttcactactgaaacactacccatccattaacatttaattcaaaactcactgcttctcgatgtcttactcccagctagatgcaatctttcctttgactctggctctttgtatcagacagaaaccacattcagggcagtgcttcttaatcctggctgcatattagaaccacttggaaatctattaaaaatattgatgcctgggccccaatcccagaatttcagatttaattggtctggggtgaggctcaagcaccaatatatttataaagctccccaggtgattcaaccatgcagccaagattcagagttactgatgggtggatgagtgcattcttaaacaatgtttatcaatgaagtcaagctaggatattaatggcttaaagttttaatagactaatctttagaatacttgcatttttattaaaatcaatgcaacactatgatctaagaacacaaaagtaaataagatttttaaaaaaatgtctaaagggagaactcacaatttaaccagatggatgcaaatagaattgtatacattgtctatgatgtttgggtagtactttataacacatgtctaaggtgcattagaagtatagagaagaaaaggacgtggcagagaagataggaaagggacttcaaaatgtggatgacattgaattgaatactgaagatgttaaaacattccaattcttacaccttcctaacaaagtaaataaaaatacagtgaaaagatgctgaaaagcagggagttgttttccaaatctcatcatacattatactacttgggtttggtgaactagttcctagcttgcattggagaagaagatagtaagcattgccttccgagcccaatgtataagaataataggtgtgacaaagtttttgaactattctaagaggaactggaatgacctaagattttattagcccattgtctaggtattctccagatgtcaatttcagtgtcatagacttgctttgtccacgaggctatggctgatgtcagtccctggcttcatggagtctcatgccttccactatcagaagcattttgggtacacttcattaggcctggtcaacttctaggggggaaaacactaagatgagatatgggataaggcataagacagctgattaacctaggtagagataggtgtccatctctggataatcactgtggttggggaaatagtctacaggagttttctgtttctagtctagtacgatttgtggttaaaataggaagatcttagaagagaggagatgtgtgctgcttataaaaacaaacaaacaaacaaaaaaaaacaagagtgttgagaaagtctgagctataaagagatcctgccctctcttggccaccacctctaaaatactctctcctattattcacataatttcccaagtgactttgttgatgcaaaaatgtctggagttctctactttgtccactagccagaacatttactgtgtggccttgcagcaacttccatcaagggatggagcctaagctgggtacccattacatgtgcctttaaaatcagctactcaagaagtcgaggcaggaggattctaagctcaaagccagcatgagctaaatattgaaacactcatctccaaaatatataattaaaacaaagaaggtagatcctatttccttacatcctttgtgactgccatggtcaacagaataggatacaagaaattaattgtgaagtgaatttgagctgtgatttcaagaggtcctacatgcttttgcttctttcaaaaccctgccaccaacatcagaacaagcccaagctggtctgtgggggaggaaagataatgtaggcagagccagatggttctagatgagtctattctagaccagtcagccaccagccaaaccaccagttgagtcacagactatgagtaagctcagccaagatcagccaagcctggccaagactagaactgcccaaccaagccacaaactcaagagctaaagaaaaagattgttgttttaagctactggatcttgtggttgcatgttaacagaatttttgtggaagcagataaccagtatagccacggatttacaaaacagaataatcccacatttaaccacagatataatcattgtacctcaatgctactagtgtagtatccagaatcagagggtggtctaagcagcatgcacttgagatttttctgtcacttaacagttaatggtggtataaaattactataatcacagtcaaaacttctcacttagaattggggaaaagagaaggacccaagttactgattcttacttccaagtgctccgatgtactttgggagtctctctctctctctctctctctctctctctctctctctctctctctctctgtctctctctctctgtctctgtctctgtctctgtctctcctctctccttcccctgccgtgtgtgtgtgtgtgtgtgtgtgtgtgtgtgtgtgtgtgtgtgtggccttggcaagaaggtaattccattattcccatccacagaaaaaatatccagcttgatgggaataataagataaatgatggctttagtaggtgtcattggcatcagtgtgttgaatcattttcctggcaatacattgagctctttaattggccaatctggaaactcagcttctgccagctgggcagttttccctcctccattttcttcagctgcaacagggagatagaggaaacagacttggggaattttcacagtcctcttgcttacaatttgattcaagaaaacttagagggctctggatttccttggggcttaagatattcctggctcctgtattcaggtctgggatttctcttgcaacatcacaaccaactagtcattattgccagaaatgtagtccagctaaatatcacccacacttatttgctcctagcccctgcttccctggatttttgtttaatgagttagaacttttctactgttgtgtcgttgggagagtgggtaaaggaagtaggtaaaactaacctctctcctaaccctaggtaaggattgaggggaggacctcttaattcttcagggtttcccctggaattctatatcaccttgcactgagaaatagattctcaaaatttgtcagaatgccagatcttcagcaatatagaaccactgctgacaaatggaaatggctctgtttgacaatatctctttttacatgccggtgtgctttccaaatgggtgaagtttgcctcttattgtagcatcgtacagaatgtcccaagaggaaggcctcacaagccaataccacgacattttctaccacatccttcagaactttagccggatggatgatgtgtggtttgaattccaagatatcataggcttgagtttaagtgaatagcatctaatctgtggaaccaggccagatttcaactataagttttgaaggctgtttccagaagtagggtactctttctagaacatgcaaattctgtgtaaatacaacaaatccctgagcccagctccatatggaagcctgctggagaactgccagttgggctgcatgcagagtggcattgagagaaagcccaggccatgtccagagagtgtgtaagagaagcacttgattagtcggttcttcgtgctaaggtgaaggggtaacagagtaacacgatatgggtcatcttttggcacttttgttctctacaaatttaactgaagatcaggtctgttaggtgactttgtctttacagaatgagaatttaaaagttgataagcatttaaaataaaatctagagagagtctaatgaaaaatagtccccttaatctcccaaaagaataccttcacttctcagaaaatgaattcacttgtatataaaagccagtcctgtttgtttatattcaaatatgccatagccattcccagctgaaattgttacatagacacaaatatttttctttttaaataaaaattcagataatagtcatattccataaaggcaatctcaatgttttgaggctcaggaatacttactctgcctgaatctgtttgataaagatcagatacactttgaaaccattaaaatcacgataaaagttacctttactgttttgaactttgaaaactgtagctgtgaatgggtatgttctgtttaccactgtgtacttttgtattcttggtgacttatcattgacctccgtctttccagagacctctaatctcctgtgccagttgtcttcagaccatattttaacacaggaatggttctagcaccccatccataaagaccagagggtctgttggaggctccagcccttcttcccctcactctgacactgccagtgggggcatgtaagaaggtcaacagaatctaatgtttgcttccagatgatggattcttgaataagggcagaagttaactgaggcagaagatttggcctgggcctcagtagagactattatggtggcagtgtccagtccatgagacaagaaatatagcaggtgctctacaaataattgctgagaaaactgaccttggtttctgtactttaattagctacatgcttatcccattgctccagacaatgtgtctgagctcaagacaggaagtgggaggccagttaatcctgttctccttgatgaaggtggtaaaatctttcctggaaaccttcatccagaaacacaagagaagttctattaatgaagaagtagatgaatggatattgcctagacagctaatgatgtctctaactaagaaaaggaataccaatgagcaagaactctgttcttctgacagacaccctgggagtctagactaaggacacagaaaccctgcctcataaacatgaaccctaatctggagggacaaggccctctgctgcagaccaagcatagatgtccctgcagaggatcaattcatcttgagaattgggctctatatccagacacaagtgtgtaaccactgaagggagaagacatgttcatttcaagaagccagaatgactgcaggtcacaaagactttccaatctgagggacttccctggaagccagagacagtcctagctattcagaattaaaggcccaagtttgtgatggatttctccacacattcccaaatgtacaggattcttgctgagtcttccactaactgcctcccaggctccagatctggctccagcctattctttcaggacagtctcttccataaggccccactaacccagcaatgacccttacccctctaacctttctctgagtccacatcctctgaccacaagaactaaacagttccatgctctggcccacaaaggctccaaacactgggcctgaggagtagctaattggtttttaacaagcctcagataatccagacatttaaatattgatgttcacttctgggtagctctaaacacaaaaggaggaaaaagcatgtgtaaccacttcctctcattcgtctcaccatgataatggccttcagtcaataagctcagcttcataaataggggaatcattcaaattcaaagggaagatttgattgtctctgtcatcaggacacaacagttcatccatttggtgtcacctgctctgcttacccaacatctacatacctacacacatacatacatgctcacacagatttggaggtcagaagagaactagaggaatcctgatcctgaattgaagaaagaagcaagcagatgatgcagatcaagattggaaggccatggcatcattagatatatatggaccattataatgccctgggtagactacagtgcggacatgccccaaaaaatccacagtcccatttctacttccctcccaatttgctcatcctctgtggtccttctctgctcacttggtgtacacttctctgtgtatctctgacacttgcttatctttttctcattttatattagttcttgaaaaggtccataagaagcagacattaatttgttgcagtgctgaaacttctgtttgtcacttgtatctggcagttatgattaaaggtccataatccactgaaatacttgcttgcttctaaaccagggtcaaggaatagcactaagatgtcacatagcaatcttaataatggcactatcctttggttcaatgaaaacaccattaatatcacagtgatgctcacagaatcacaatttgttgacttatgcataattgaaagttgatctgccttgcacagactttcatattaatggataccttatgttatattgatgcaggttctcccattatcacttcagattctgtgcttctcgagggtagtaccttcattactctgaggccaggagtcacatactcacttatattaccagcagatactgatagaagcagttttcttccatttttctatgaactaggcaacagtgataaaagagcatcactgggtttaacaatctggaaggcttcatcttctctacattttctccactttgacactcagcctgcttagtgttcagctttagatttctgcctttattcccaattcttgctcaacattgcttctggttacagtgggaagggaagggcttatggagctttgtggcaacaatgaaaaaacagagtcctcagagtagagtttgctatggaggcttgtggggtctattgcaaaagatccctgggctaggtagctagtgactagagaaagaggtgaagtgtctctccttctaagagcatctggaagtggattgatcagaagcctggtcagtgtgcttctctagttggattgttgttatccatccctctgatggttgagttctgcatttgtccttgcttatactaaggactttggatggacccttacctgactgttgtcaactgctggtctaactcagtgactgtccttctaagcaacttttggaaacccaaaactgcctatactttctgggtctcattaatgcaacagaaaaatagacagcagttcagtaggcctgcttgctgcctcaaccccactctggatatgcaaagtttatgttaacaagaccattcctggttgcctagacagcctacaagagccccacatggacaggagtgtggaagtccactctttatttttctcccaatttaacacatttcactgaattaatgatggtactagttagttatgccagtgttctgtgttaggaagctctgacacaccctgattcattctcttctaagacacagggaagtatgcaaatatgtacctatacagtcagcagagtgactcctgtgtacaaaggagtgttggccccacgaggaaagatggtggcctgtctgtaactggcttccctcttccctgaatccctgaatctggtgatgtaggctctgggtctagtgaagcaagaggaacaggctatgggattttttgtttcgtataatccagtcttcatcaagtttcaccatctagattctcttcagtatcttgttgactgcacctatcttccaatgtgatggttttggtaagtgttttgctttggaagcccgatttcaaaaaataccatgactcatgacaaaatcctctgttgtacttggaatttgagtattagttctttttttaaaaaaaaagatttataattattgctataataatccttaatttctgaaaatttggatgactaacaaaataaggaggaatttagctttaaaaaaatacatattgggagtagagagatgattcagggagtgaagttcttgcttcccaagcatgagagcacaaattcaacccccagaatctacacaaaaagctaggcatggcgatgtgcacctgacatccaggcacagggaggcagagagaggacaccaggggcctcttggccagccagtctacccaaatcagtgagattcggcttcaatgagagacattgtcttaatcaacaaagtagagagtagttagaataaaatacctgctgttgacatacacatccaaacacctacacacatgttgtacacataccttcacaacactctcaactctctgtctctgtctctgtctctctcaaacacacacaatacaacaaaatattagagcatattaaattctacaaaacaaaacaaaaaccccacaaactacttaacaaagtagaattcttttgaaggtctactttttaaatcttatatgtataagtgatttgcctacttgtattctataagtataccacatgcataccaggtgcccatggaggtcagaagagagtgtcggatccactggtactagagctgtagctatcagcaaccatgtaagtgctaggaactgaacctagtccctctgcaagagcaaaaagtgctcttaactatgaggccatctctccagccaaacacagtagcttttgtttgtttgtttgtttgtttgttttaatcataccagaaggcctagcatgaagcaatgtgaagaatggacagaatagctgagaaacaaaagataaacatatctctacttgtcctctcattttcttcaggaagttagaaagcagactttcttggtaatttcattgcctttcttggtaatctcctacaaagttaaatcagctcttattttcaagatatctaccgtggatggtatagtagacctctttgctatgtttaattcccatggattgtaaccccggagccctatacagatttggattctttaggtagcaatctctgacagggaatgaacatttggttttgctttgctattccagtattaatatctcatagacggaacagaagttacccaagaaaattgatgttatatacaaacatgacattcttaacagtattttggggtgggccaaaagagaaagccagaagttctgtgtgttactgaagtggttctttgttctttgtgcttttctttaagaagaaactctgggcatggaaatgcaggcctatgatcccagctactctggaggatgaggagggaagactcaatccaatttcaaaccttacctggtcttcagagtgagcttaaggccaatttgggaacttagtaagagcctgtttcagtataaaaatgtaaaagctgagaaggtggttgatctggtgataattacagggatagccaattgctttctgattagatttaaggaacattgcattggaggaaactcatgcctggtactgtattactggccaagaacacatggctagggtagtcataagccgtaagggagggaggacctactacaattattttgctaagtgggcataatatcaaactatggagtggccttctaaatacttccatctatcgattagtgtagcactcagctctcatccaagaagcttttttgttgttcagagcatggcagttaatacaactggttcaaatataaagaataagggattgcagagtgctcagttctaaatatgacagcggtaccacaaactgtccctaaagctcagggtaaagattgtaagaacctgaggttggggaggtctgcagtaaaatgatgtcttctggacataacctggctggtactcttgggaattcacagccatttgtggctgcctgcataagacctgtacaagatcaagccatcataattcagcatggatggggaagggaaccatgtagccccacatctacctgaagagttattggcaataggtggtttcaaatcagggagagtcactttcctccaggtgtgtgacgcatgttgtttgcccatggtctagtgggtcattctgcacatgcgcgtatgggcagtacttattggagtcagtgggctctttttctaaaacagcctggagaccaagttcaagtcagtgctagacttcttcctgtgtatgtggaagggccaatgctaaattttccataccacagaagcaggaaaacaaccaaacaaacaagcaaaagaacaagaaaaaaaaaaaatctcctaagattcctgatgcagtaactggctgggcttgcctttccaggaagtagccacttacagtagtaagtgtctcgtaaagctcaacttctgcctataagcatgaggacactgacaacaaaatctaaacatgattcttaaatttggctagttcatctattattgtggaagatttcagaagagaacagagtaggattgcctacatttgtaaagtacaaaagcatttcaagatgacacaggattttccttcacatagtgtttgcaagcctctctatcatattttcagctgcaaagctttaaccatgcagctcacatttaaagtagaatgtttagaactgggtatagcggtgcatgtatatagtatctgttcttcagaggatagcactttcaaggccagattgggctacatcgcaaaatcttaaaacaagaaaaaagatgcttgggcaggccagatacctttaatgatttattttgacatgtgtttatctgtaccatattagtggcaaaattgtgtgtgtgtgtgtgtgtgtgtatgtgtgtgtgtgtgtgtgtgtgtgtatcggggtgttacactgactcttataagcctgacttcaacatagaagttgtcaagggtggagatgagcaaaactcacatcacagacatgatgtttggctattgttagtaagctaacccattgtcagatctgtcacatgtgctagaagagggtcctttccttttttttttggtcactctgaatggcttcttctggttgcaaatgcatgtagcatttctttatccattttcccctctgtttgcaatacttcctgcatttccaaccagcaggttaataggatgcagagcgcaaaaaggtccagggaatctgttggttacagtctacttactgaggctgtggctctgatactacatgctgaagtcagggaaaagtcaccacccaaacataatccaagggaaatgcaagctgatgtagcacaaagatgctttgtttaagcacggcagaaatttctagcaactatctgggcaaaaaatatgcaggatgggagggaatgtaatcaaataacaaaacaaacccaaactaaaagagaatctttataaaccagcacaaggccactttgtttttaagtgcacacaatgaattttaaagatctttgttcagaaggaaataaagtattatgaaggactgacacatttgatggatggacggtttctaaaaaaaccacattatcaattacttttttcttgtttggctccagtccagtaatttttatttgaacaagccacatgctagcatggttttgattgcaggaagtgcctggctgctgttaaagggtactgtttcactgatgggcttatcgctgccatccccccctccccttgctgatggaactctgatatgaaaggcacagcttcagttgttataaacagtctaggattgtttgctagacccgcccgtgttttgcttgcagccttctgtggtacaatccagaggacgaattcagcagcactctagaaaacaaacacttgaattcagcttgtatctgttcttaattcagaaatgaaattttgattctgctcatgcttatgtctcataaatctatgttggtaatcaaaaatacttgcagatattatattctttcaaaagttctagattactctcccaagtgaatgttgatgagaaaaaaagggggtgggagtgcttaatggagcagtcaacctaaaatgtctgaagtttattttcaagcaatacagtcagtgcctggttctagcttttcttgtctttttatgttacaaaaaaacaagcatgttagaacactgtttattagtacaatataagaagtagagcttattaaataatatttttatgtactgagtatgttttgctcctctttggctaaagaaagatttgagaatgaccatcaattgggcaggaaagttgcccatgaaataaccgcttgacacattcaggagtatgtgtcatatgatcagtattatttgatcataacttcatgactactgtttgcacataaccatgccaaaaacttatatttctaaattcccagggttatcagaaaaactctaagctttcagcacttacttaggtacgcaccctagttctttctgtattttaaacactaattttagtgattattcctgtgctgagaattaaaacacaaaatgatttagagaatgggccatttgattattcatcagtacatgaaaacaatttgaatgaattagaatttaatctggttcatttgaagaaatataaatttagaaccatttgttgattcactcttcatatagtaattctaaaagatctcactgcaggaatacccaaaatgcatccagctgggtgtggtggtgaacgcctggaatcctagtatttgggagactaaggccagaggttattaaattcaaggtttcccaggactacctagcaatgttcagggcagcctaggatacctagtaagaccctgtctccaagagcaaaacaaaataaattattaatcacaacttaatcctttaaagccaaattatccaaacaatttatgtatgtgtgtgtatggtatatgtgtgcttgtgtgcacatgcgtgtatataagatttgagtgcatgtatgcatgcatatatatgaagacctgaggtcattgttgaatgtcctcctttatcactctccatcttactttctttgattgaggataacagaccagtgagccctgggatgcaactgtctccagctatccagcactggaattacaggcaagtttgccatgcccagcttctttatgtggagcctcatgctgtacaacaagcacgtcaacccacaagatttttattttattttattttttattagttcaaattaggaacaagcttgcttcacatgtcactcccttctccctctccctcccctcccccccaacctcccaccagcccctcctccctctgctccccatggagggagctccccaaattccaaaacatcatcctgggatggccctaggccctcccccatgtctccaggccaagagagcatccctttacttgggatggactcttaaagtcccttcttacaccagggaaaaatactgatccactaccaggggccccatagagtgccgaggcctcctcattgacatccatgttcaggggtctggatcagtcctgtactggcctcccagacagcagtctggggtccatgtgatccccatatttaaagccagctgtttctgtgggtttttccaacctggtaccaatgacccctttgatcttcattcctccctctctgcaactgggttccaaagttcagttcagtgtatatctgtgggtgtctgcctctgcttccatcagccactggatgagggctctaagatggcatatgaagtagtcatcagtctcattataagggaagggcctttagggtagcctctccaccactgcctagattgccatttggtgtcatccttgtagatctctggaaatctccctagtgccagatctcttctcggacctttaatggctctctctgttatggtatctctcatcctgctctcctctattcttcccccaactggacctttctgctcctccatttcctcctctcccctcctcttctccccctctcattctcccagctccctctccccttccatcatgctcccaattagctcaggagatcctgtcccttccccttctccggggtccatgcatttttctcttagagtccttcttgtttcctaattcctttggtgatgaggattgtaggctggtaatcctttgctctatgtctaaaattcatatatgagtgagtacatacatgtttgtctttttgtgactgggttacctcactgaggatggtttcttctagttccatccatttgcctgcgaatttcaagactccgttgcttttttccacatagtactccattctctatccattcttcagttgaggggcatctaggttgcttccaggttctggttattacaaacaacgctgctataaatatagctaaacatatgtccttgttgtataaatgtgcattatttgggtatatgcccaagagaggaattgctggatcttgaggtagactgattgccattttcctgagcaaccaccatactgatttccaaacaacccacaagatttttaaaaatcgaaattatatacaaaaattgggcatagaggcatataccttcagtcctatcattctagaggcagagacaggtggatctctctgagttcatgggcagcctagcgtacacagttttagaccagccaggactgtgttctgaggacctgtctcaaaaacaaaaattatttacataaatgtcgtattctttctggcacagaagagagtggtttggaaaacaacaaaataaccttgcagaaaatagtcttggatttgaatctgactctgcaatttgctaattatataaagaaaatctgtcctagaccccatagatttacttgtaaaagaaaatgagacggaaattaaggtattactttcaatcccttatttatttgcttattttagtgctagaaattaaacctaagatcttatattctgttggcaaatatcctgctactaagctatattcctagttctcttttgttgttgttgttgttgttgttttcaagagacagggtttctttgtcaaccaggatgaccttggactcactgagattcacctgcttctgcctcccaagtgctgggattaaaggcatgtgccagcatcacctggcctgtagttctctgtttaattttcttccttttttaaattttgaggtagggtctcatcaagttgtacaggttgtatttctgtttacttgtagcccagataaaccttgaatttgcaagtactcctgtctcagcctctcaagtaggtgagattattggttgtcaaattcttgacacactcccagtgacttgtatctgacttaagacagtgagggaatgaagaaaagacggacatatggccacacttgaagaaagctgggatttttttatggcaaaactgcaagactcaaaagctcagaatgtttattatagagttgaacagggggtggggtggagggagtgtatgctattgagtacagctggcaaggaggcaaggttattacatacagataaagtatgaggcaaagtttagggtatacagctgaatcaagaggccaggtttagctagtcctggtaggatcagtctctgttatgggagcaatcttcagaccataaatatctattagggagaatgctacagcagatattttcatcacataccatcaacatttacacatggaccagaggaaggctttgctttttccctctgaggctcacagcaggaggaggagggggctttgccattctgccatgagacatggccatgcccatgtcaacagtacacattcactcaggacttcatttatttaagtctccctccaatacctacaatcagcctgtaccaccaactttcaccacattcagtcaatgtcagagcaatgccttgtagactcaatgaatgttaggggtgacctagctagggaaaaatacaggtcctttagcagaatgcagtgaggccaaaattctaagaaatcagaactttttaaggttctttgcagagtatggcagaacacatgaggccaaaatcctaagacttcagaactgtccaaaacaaaattacacatccctttttattattctttaaatttccattaaactgactagttattatttcatttggcaaccattcttccttaagtgatggcttgatatgatttggttttaataattagtactaagttttagttttggatacagtagctttacagataataatgttttaattagagttacttgacacagcatttataaatttgcctggacattgcataagtaattagaaaaatgtatgtaacatacgtcatgcaacacaaatctagttttctccaactttcaaaactggtgttgaatactgatgggggagggccttctgtgtatatgtttgtcttactggttgataaataaagtactgttggccaatagggaagcaagttaggtgggactaggagtctaggaggattctgagaaatctagtaaagagaatcttacttgtgatccaggcaggaagtgacatagcaggcagactcaaaatataagcaggaataagcaggaaatccctctcttcctcatcctgtcttctctgtggagctgccatgtgatcccgggaagaggacacatgtcaccggcgtcctccataagataagtctttataaatatacagattaatggctatggttgttacttaagacagagcaagcatataaaaaaccctaatcattggccagtagcattgtacctaatattaatctctctgtgttatttcggacgcccacgtggcagcggggcttgggcagttgacagaaagatttatccttacagtatacagttgtttatatcaaattattgtaaacatttcaatctcaaattgatgagaagcagagtattcattttgtaagtatagtaggtagctagtgtgaagctatagcttagcatggacctctgtgactcgtctttacatctcattcacttattttagtgtttggtggaaaactgttgtagaatagattgctttatagcaatctaaatgttacaaacaaaaagtctccaaattgaacttgaagtaaatgtctgacaattcttttatctttctattgtcttattaaagtatatttatacatgacaattgccatcataataattttccaagtgattagttgtctagaaaatttaaagaacccaagattctccaagaagataaaaataaatggtttcctttctagaaataattaagtaccagttttcttaagcttgtaaaggtaaaattgtctgcacagcaccatctacatagcatttaggtccttcattaatatcattcttatagattatatgattattttcatcatgcctttcctcttcaaagccttaattcctcctttaaattctcactggataaattatagtaggtaccttgctttgcgttttaaattgcaactaggaaatgggtgacatttcttcatcttttttgggtagatgttgcaaaaagtcagattcagaaatctatcctaagctctaaaatattctgtttgggagcaactgtatcaggaaaagtataccaatcacaccgtcctcagatttccttggagaagggtgaatgggggagttgttccattgcatagtggcgtctgccatgcaggtggaagaagtagagataataatcacaggataaaggtagtaagtatcacgctctccctgcttgtccttttgacttgtgactacctccatcatctgcatcttcagtagagcaggttcatcatgtacagcctgtattggagttcattagaagaatgttcaaaatggcagtctgatgtgaaaatggaaagatgagccaaaagaacacaatgaagaccaaactttcatcaaaaagaagaaattacagtggacaatgattccaaagaacagaaatctccaaggatccctggagatgctgagaaggatattgggcttctgaaaatcatacacggattgatggcaagacattttgctcacaggtataaaaacaagaaatcaaacagactggaagatgaagacactcaattagctggcatttgacttatgcaaatgccttcccatacacttttaaatgtaaatacctaggtcattaaagcctaattcttctttgtggctgtacagataatttaacgtgagagtctgtttcttttctctgtagtactggagtttgaactcagggcctaacctacaccaatcattctactacccagataaatcctgagcctaaattgtggagttcacctgtccttgtttgtaggcatgcatatgaaccaagctggccactctcctctgagttatggtttccattctggtaggacaatcacaattgccatgttctccacttaacagttttataaggaaacacttcatagagcacaaagcagtaaaattattgcacagcattaaagggcagctttagtaaactggaaagaagggacttctaaaagctcaatctttatttccaatttgttttcatactacagttgcatgagattaaaggggctattgttttacagaagcttagtttgctggggtgtaaaatgggtgtcttaagactcctctaactcttggtgcttttgtatactgatatataataaaaaaggtgatggaactctgtaatcactggtgatatatacaatagccgtctctctttaagatgtgtttaacagaaacacttaacaggcactgggaagatgacttaacttttaggatcacattggctctttcagagaacccaagttctgtttctactgtgactcacaactgcctgaatctccggctctagggtatctgacatctttatctggcctatgtaggcctatgtaggctcctgtatacacacacacacacacacacacacacacacacacacacacacacacacacacacacacttaaaaataaatccttaaaaactaaactaaaataatttaaattttgttctatgttacaagcatgaaggaaggaggcaactctaagaacgaaaatttcttagaatatcatagtcttttctcaaactagtagttcactgagattcgatacactgtgaatggtggatcattcatatttttttttaacaaggattgctgttaaaggaagtcatgtgatttatcagaattgtcctaagcagtaggatattgagaacaagtagtgaattgaatgatggcagtaggagcttgcatactacaattacagacacttacagtttagattactttgtgaagcagtcacttttcaacaagtgtctgaaggcataccccctcattccacatctcagcagtttactccttgggcaatttaagaagataggcagaaaacacaatcaagtttggcaaatgatcttaaataaaatcctctccggattaagaataaaacttcaagatgatgtttttagaagtgccaatgcttgtatctaggtaggaaaaggtgtagagatcacacacacacacacacatatcttttatggaaaaactccatgtagatgagattagaaaggtttcaagttgagcagactataggagattaaggaatgggctgcagctagagacaacactatagaggacttccattaattactttcttgtagaagatgatgtgatgcttagctgttctttcctacacctaccccattctcaaactgccaatttcagaaagtaaatatgcaatttttctcctggaaaaatctgccctgcaggttgttgtgatagttagcaagagcgggagcctgtgtgaaggctccacgatcagctgcacaggtgtgaaccctgctgttctctgaaagcaaagtacagcttcagtaccattcatctcccctgaatctcacttctcaagccttcagacactctaagcagggctgcagagaggcaggcgggtgcttcctgtggctgtgggaatacttgctctctacttttgccctgaggcagcagcaacagccctggattcaccatccacccacatttcagcaatgcaacgtatgttttaaaaggctcagaccaggaaggtgagctgaatagtacttcagttgccttcctgaattgaataaccacgtgtggaatttgggtttaggcaaggcatgctataaggaggcaggggacaggagttctgatgtccagtgctctcaagttgtatgactgtgggcaagtacttgtctggggggactcagttgtttaacctttaaagtaaaaataatgataccctgtttgcttaaagtcattggacaaaatagaacaatttcttcaagcttccttctatattcaaggaaaaataatgatgagtttttctctaggaataggtaagtttggatggtgtatttctcatatttgacttgcttgattgacatagagtaaagtaagtctacagttctctttaactacctaggttggtgaaaattctaaggtccccttcagatttcagaactattgctgacttaagtaatgtatgtctactgctgattgctttatcatcaccatatactccatcattgaggtcaaagtaccccattagtgctgacttttttcagaatgagaaagatatttcttgatctgcatgtgacccttattcaaagtgaaaactaagtggcccttccccatcacacaacacaactttgttggtacctctgcccctgtcagggagaagagccttagttactcacaaactaagagtgatcttaagaggttcgggtaatacaactttaatgaagaatgctcttttctccccaaagtctccttagtacccatataaatttgtctaccccattcccagacctgcaaaaagggtaacaatgtccacttgccttttatccactaaaaaggatctcaagccaaaggtagccttggtctctcactcaaaacaatggcaaccggcaaggccaaagctctagatcccagagaatctacaagtctagcactctctgagacactgatgtattgttttgttatctccatcttgccatagataaaagggtagtgacctgtcactgaacaaatctattgctgatctagaaatggcctccatcacactccctgtttcacttgcacattcaaagcagaccttgcatttttgaattgcatgcagcctctactcaaattaaaatttgcctgccagtcactagtgggtgagataaaggcacagtcccgtgtgcgtgtgtgcgtgcgtgcgtgcgtgcgtgcgtgcgcgcgcgcacgcgcgcggcgtgtgtgcgtgtgcgtgtgtgtgtgtgtgtgtgtgtgtgtgtgtgtagcacatctccaaaatcagctgtgcacagatgaaaacaataggttggtctttattgactgggactcaagaatgtagttatgacttaatcttaaattactccacctgccccatacttgtctttttttttttttttaacctctcacctttgccaacattttctgaaactgaagcttttgcattcacctgaattcacttcatggtgattggaacagccaatttgttcttaacattcaggtctctgcttaaacatcctttcttccaagaagccttcctatctgacattgtctcaccaccccaggtattgggaacccccttccacttcatttctcttcatagcgtttgcccctcctccacaccatgctccaaaagagaaatgttaagttctcacataaaataaacattttgttgttgtcgttgttgttgttgtttactgacagcctgggtttaatcagaagagaaatataagtaatttgaacaagtaaagttcagtcagtataaaatattatcacccacaacaaggaatgagaaaaaaaaatgatgggtaaaagtgacaagactctcttatcagtgtgtctcaaactgtttctacctgctaatccttttcattagagaaattctgggcatccttgggtcaaaaggtacattaagtaggtatacatctcaaacatttacagatgataaatcgaaaagaaatttattttgaaataactcattgatgtatatataacttaaccgttaaagatgaaaagacatttgcatactaacgagacagaagtgcttatttatttttacacaaagaattaaatcccagctgaatatgtgatgctgctgcaggacacctcaacattttcagagttgacagatactatgaatataatcatcaattcagagagcaccactttgcataaacacatagaataaaatgggagaagtatgtttagggccacctcggaaattgttggagattctgtcctaatctcaaaccaaaattcattgaatgatttttttatgaagctcaagtcagcaattcaaacagcaattttaaaaaccaaacattctaacacaatcctatccaaagacatactaatttgatacttacatgtggaagaatagtggtaggaaaatattaaaagtctgttttctataattaaattatttttccataagagcagaaaactttgtatgtacactaaaaacactgaaatttataacttacaatagtctagactctgaaccaaggtgttccagtcatcttctaatgatgctgcataacagggtagaacgtgcttgtgtgttcagaaccaaggctacagtcctgcaatggaatgctgggccagaaaaacctttgattcattatacatttgattttgaattaattttttggttatgtgttcagaatattttaaactgtagctattttatgtctgggtgtctgtgatataggactctagatcacgcaaaacaggtataaagagaggcaactgcctctagtactgagacagaacaccccctacctccaccctcaccctcccatgcctgctgctgaaaaggaattgttcttgcaagaccctgaagactcaaggacttagaagtggaccttgctggagaaaactgttgtaaccagctgaaaagcagatgattccagctggaaacctgctttctgtaatgcaccagaagtccacacatcagcatttgctgaaaatgcctttctttgcagtgttaggaggaaggtatatgctcagtcacttgctccaaagccacctaactgtggactggatgaagcttctggctcctgctccttgttctttgggggaatggccctgcacacacactggactaggaggcaagcttctttgtcttggaatctctccagggccctctattgatgaacctgctctcccaactggaaaatatttaaatactcagttttactgagcagacaaaggtaaaagttaaaacaagggcaataaatcagtaatagccatgtttgttttttaagttatcttattttggcatttactttatactcattaggtatgccgtgaaataataaatgatgtatagcctttagccttagtaaaaagtgtgcttggcctcgcatgtcacttttgagactggacccctgctaggcatggcttttatacaccaatggtgccaccaaagccatctcatatgagatctctggagtctctcactctgtggtagaacaaaatagagcccctaaatcatttcccagactggctcaaccgtttgtgaaaagacagaaaagcacaggtaggagacatgatcaacatgagcaccatgcattgtgcggtcccacagggcaccttatgtagattcaacacaaggccaaaatgtaacacatacacacagactgcagtttaaaagtgtacttaaatgataagaaacaccctgttttctccagccacttttctgttgacataaagtgttgagaagttaagagaaaggtctctactataagctggtatttcctatgaacaaagtttctttccaccctgaccatttcaatactccttcagactctagtattaaacttcttgttttctgtcctgggaactgactgcatggaatttcagtaagttggatccaaatgataaggcagctttctatacggacaacacagggcttggatttgccgaagccatcaacaagcatttactgggcaccagctacactctaggcatcatccaggacatttggatcatagccctgacaaaccagcttccgattcccatggaacttactaccattttgactgaaatagagaaagaacatggaacttcccacagagacactgtggtattaagccactaaaaagttccagggaaagcaaataagcaaccttagaaaaacggtggctgttcgtgttctgagactcagtgtcctaatcactcaagcctttgtgagaacggttctgaacactgctgtataatgggcgtctgtgaacttcagaaaataatttaggaccagcaagatagctcaacaggtaaatgcacttgccatgtgtgagcttgaaccccagggcttgtgaaagatctctctctctctctctctctctctctctctctctctctctctctctcttcccactaaataaatgtgtaaacattttcaaaatttcttggaagccaggttaaaaaagcaggcaaaatagaaacacattttgcttaagtgatatttaaaaatgtaatcccaatatgcaaccattattgagctttttagtatcccctcatgtcaaaatccgtctttatgtgaatatatagctctttttattctagtttggccacattctaatagtttgggtatatgacaaaggcaagtcctccatcgtcttattttggaagaaaattatccgcagaacctaagtgttctatgagcttcagttctggattttttaagaccattgcccctgtgtcctcagggaagaacgctttgagttgggcattaagctactgatttccttttccaaggaaagcgttattattagcaaaaactatttccccacttttgttgaaccaacagcatcacattagctggtacctcgagttagagtgggacccagaaataaatgtcccaaacgcaacgaccttggctataatcccgcttgactttttctgaatgattctgattgcccaaaggtcagaggtttcttagcgcagcttgcaagctccggcacaccttctaagcctcaaaactgcgtccggctgcctccctcgggctctgaccctgctccccaggccatcttggggcctctttcaacccgggacgaacttgacttgcggctcccaagaaaaggaacgttagagtcgtccggccggccaggaggccttgggaccagccagtttgcacgcctcccggctgtggctctaaaccgggccgaccgcgtccgcgctcacgcggaaaattatgccgactccagcagcgcgtaaaatggatgtgaaccgcacggagtgggatcagcgcgatcctccctctcttgtctcaacaggggtttcggcgcgttgcacaaggccgagcttgtctctttactgagacatcggtccctaattagtgcgcaccccggcgcggccgcccagcccgggctctgcgtcgggcgggagacgagcctcggagggcgtcttcggaccggcctgcaggctcaccgccgccgccaacgccgtcgaaacctgcttctaaagatgcagccagggcagcagcgacagcagcagccggggctcgccaccccacgttactttgattgacagctgaacaaatgtttccgcggttcgaacgctcgcgctagggaacggcggccagggtgaggctccgccccgggcgggacgctgcgccccgcccccgtcagcaccaaccctttgcactcattggtcggaactactcgtcacgccctgcccccacgtgggtacagcctgtccgtccccgcccccttggcttgccatttgtcagcagtgaaatgatgggcagtaacacagaacggcgattaatgttcagccatctccgattggttggtgtggcgcccttgcgccgcgggagggcggagcgcctggagagcgccgcggagcgcgcgcggggatagctggagattgtagtcaatctggcggcatccagggccacagtagcgtcgcgacgactacatctcccgggatgctccacgggtcctccgcggatggtcgtgaatatgtatcagaatgttaatgattagctgctgctaaatttggtcaaagaagtcacctacacagagcgcgttgttagagccgttccgagcgggcgttcggctgttggctgccttcttccccctcttacacactcgtgtattattttgaggtggtgttcgcagagtttgaaagagaattttaaaaagccgcaagcgtttcgctcttttatttttataatccccttcaatttggggctaagaaaacaggaaggaagaaaaggaaatgaaatgtggtaaaagaagctaaaaggtgccttttaaaagatcgttgctgtgaagtgaaaaatctccagagaacccccaagcgccgcgagacctcttccgaaccaaaggagtttgcgctcgctctcaggcaagaagcgaccattcattccgaggaatagcagccaattaaaagacaaataaaaaaagtttggagtggggcgcgagcgagcgagcgggcgggcggnnnnnnnnnnnnnnnnnnnnnnnnnnnnnnnnnnnnnnnnnnnnnnnnnnnnnnnnnnnnnnnnnnnnnnnnnnnnnnnnnnnnnnnnnnnnnnnnnnnnnnnnnnnnnnnnnnnnnnnnnncctgcctgccgcccgcgtcacgcgagacccgcaggcccgggacgccgccgcggggccctcgaagcggatgagccgcgcgcctctgcccggcgcagccaactaaagcggcgtggatgattcgcgacctgagcaagatgtacccgcagacgcgccacccggtgagtcgcgccgcgccgcgcccgccgccctgtccgcggccggccgctccgagggtgcgggaagcgaccgacttgtagccattttcttattgtttgtctcggaagccccgggaagccgcgcgccgccgctctccgcccgcgccgctctcccgagggggcgagccgggcggcgcgagtctgcggggcggagggcgcgggcggccgcaggccggactcgcttagctagcagacggcggcccgacgccatggcgcggctgcccccgacgggccactttcgattccgggtagggagggatgggtgcgcggggccgggggttcggagcttgggggtgggggaggcggacgaggagcaggctgaggagcgggtctagggagctgagggaggccgcccggaagcactcggacccctgcgggggagcgagaggcgggagcggcgcgacgaccccccccccacatcaccaccgcgggctgtcctcccccacctgcgatgtgggctaattaaatattttattgttgttctttaggcaccgcatcagcctgctcaacccttcaaatttacaatttccgaatcctgtgatcggattaaggaagagtttcagtttttacaggctcaataccacaggtaacgatattgactttagctgatcctcctgtttgcttagctcttgtctacccccccaacacacaaacaccacccccttcgcctccctcccaccccacaccaccacaaaggtattatcattttttcctgtgggcaaaaaaggcaagtcagggcctcttttcccttcaggcaggtgtaaagaaattaagcattttcatctcctgtaaacagaaaaggaagcagaacaatcgaaacagaggagacttggaaaacgctgaggccaaactttcgatattgatttattgggtcagaagaatggaaggttgggaagattctggggccttttgacttcttggttctttattacccagtgcttgatcccttccttctgccattccttggcacagcttgagagcccggggaagtaagcagtgaaccatttcattacttttatcaaaaaaagcaaaacaaaacaaaaaaccaatgctttcgtcttcgaggttcttagacttggagtgcttttggaacatgtttgtttcattggatctttaatgatgcagaattcttattgcatatatgcaagaacccaaacaagctgctggtccagatcaacacccccccccacccccatggtattcatggagggggaataaaggacattcataaaactgtttttgattttgattaataaatcaaaataaaggtaaaaccatccctgtggcatttttgtggacttagttttgcttttatatataattattatcgatgtttattttcgtgttttagtaagtgaatttagtgaagaatattcaattctggatgaagttgcagaattaaactggctaaagggtttatttctttcaaacataaagccctctttttcccaacccccacagtttatccttattgaaaaggcaggactaggctggttcttgtcgctcctttctctcttgcctttcattagtaaagtgctgtttcatatcattggtttgacaataggaagtgatgatttagaggaagggatgtggatttggagttgaaggatgtaagttaagttctactctgtacttagatgattttatgtcttgaatagtctgaagctggaatgtgagaaactcgccagtgagaagacggagatgcaacggcattatgtcatggtaagaaaactgtgtcacagattcaaagtgctcattagcctgggatactgaaagcaagaatgtgttttaaattgctggaggctgcagcatacatcacagtggccctgccaggggtgttgaggttgtgggtatgtgtccattagcaacctgtaattctaggttgttataacttggctttgacaaccagctttgattttaaattttcaaaaagttcagttgcatggggtataattttctttgctttgtttttacagattgaaaaaatgggggaaacactcatttcttgtttagtcacaagcaaaatgtttttgttagtggttttctttgttgttttattgctcttgcttcaattgtagccagacagctcttctctatactcttaaaattaaatgtgttgtatgcctttcaattaatgatttggataggaaaagacaccagaccccttttcagaaattttcccattcatcatgctactctgtttatatttttgtgtgtatgctttcaatttcaatagtgttattttggttcttaggagtgctgatttgagctgccagattttctgtgctgtagttatactcccattcagacaaatcaaatctatgtttacagaaatattatgaagcatttttatgattcaaaagtatattttgtgttgaaagaacttgcagagttagtcattaattttctactaagctcttctgctttgtatgtgtgagtagtacactaaactaaaccctgaactctgaggtaacatcacctttttcaacagttctttcaaaacatcaatcagcatttgtgtgagatgtttttgctgtgcttgggaattgagtcatacgaaacccaagttttcatcagaatttttcaattcatttgcttataatgttggaaagacaatagaaaatgttaacaatgctgagttttaacattaattttcttgggtttctgagtttttctcttggggtgtgtcttaaagatagtacttgggcatcctttttatttattgacccagatactgtggatattttggttaacataaggcctttgtgttgattgttttcgatgtacttggtcattttgaacaaactaaagagattatttgaaaggtactgatttaattgattttccttctttgacagtattatgaaatgtcctatgggttgaacatagaaatgcacaagcaggtaagttatttctttataatcactttaagaatcagtaatactcatgtactctgaaaagaaaattgtctattttgtgagttttctgttttacaaaatagacaattctataggtagaattcatctttacctatatttttaaaagactggggatgaatgaggtcagtttttcacatgtggttcctcatgttccatagtatcctaacttttaataatttaaaatgttactcttaaatcagagtacatactaaactttgctatactttcaaaagccatatgcaaaaatctctcttacaaaagaactttccttggaaaatattaataaaattgtaaattgtgtgaagccttcattggttcactctgaaagaatagagaatgagtgagctgggaggatcaaaatgaaatctacagagctataaaagaaattgatgtaaaatccttgtactagtccccagaggctacttagttggatcttacaaagaactctagcttcgacttccaaaatttgtacagtgtaaatgaacctgataggcggatgtgattaatgtttaaccctgggtcttgaaatctagtaattattttggggttgcaggggaagaaagcactgataggtatatatgactactacagttactacaggcttttgttttattgtgttttttttttttttttgtaagagaacaaatgaaatgatttgtgtgtaggtatatgtaaaatactgcttggcaatggtaattcctccaggaagcatttctctgaagtcatctcctcatgcagaacctcaggattcatcaaccatttcagaatagataaatgtatatttgcctgcagagaaagaggtgatagacaacattttgcttttcatgtcttatttatttgtgatcagggtgttgtactcgttgtacgttccttctgagattaaaaagagtgagatgaccatctgtcatcagctgtaggaattctttttgacaattgtttaccacatggccagaatgtacctatattagtagttccttaaaagacaactcttacacagtaagggcaatttgacagtatttggaaaaaataaagctgcaaaaaattgcaacattatttacattgaagactttatttcaagttctgtcttactctgtatgctatttggttatgctaatgttagcatattatatgtgctgtgtactaatatgtacgtgttgtagtttgaatgtcacatatttaaatttttattttaggatctttgccatttctgtttaggttagtaatacaaatactgcctaagcaaaatatatccagtttatgggtagattccctttagccccacctcacaggaatacaattacctgcttgcatagtttggatcttgtacatacttcttctttttattttttgttttttatgtactctcccaaaattagtttttctttaaaagaatggactagattaatgcccctttatttctcccttttttgtactttgccttaccctgaccacttagtttctggatatcgtgtgctatctatacctatgtcatatagctgtatgtgtttcttattttggtgttggtagtatatgtgagatcccttaattttatacattttatatgactataaattttgtcatcttcctgtccagctggccacaaatgccatccatttaaaattgagaagagtacactttgcctttttccccttcttgcttttgaattcaatcatatcaagaatccccagggcagtttatcacattatgaaatacagacagccctgcaaaccacctacttattatattttctttctttttcccccttaagcacagaggcatatctgtctttatttgttttcctaggcagacagccttagtttctcttagcctctcttccagatgcacccgctggatacccttgtaatggaaagcagcaataatgcaaggaagttgccctgaggcataattgggcctatttctcaagatcggtttaggcttattcacttattagatttgtgtctcaagggttcaagagtaggagtcccaggaggcctcagaagtaccctagtaattggtggccccgatatttgaaacgtttgtgaatattttttttgttgttgttaatattcctgtgttcctattcatcttggctacagctaggcacagagtatttttaaggaagtttttcactaggacagaaaatgaaggttttgaaggacccacgaatctgtgacttagcaaatggataaaaggatgctcatgtgaagcaatggtaaaaagggagacacccccaccccccaccccccgtttggtgatgctcatcagcagttgccctgggttgattctgatggagaaccataaaatgaaacctatggggaatttgtcattctgaaatgaaagctaatgtaattagtaccaattaaagtacatttagtaaattggatttaatcttaattaagcctgcataatgttgccaatttttaacaattatgtttgagaacataattaatttaaattttggtaactgagtaaatagcattagtctggtaaaattagtggaattttttttttttttaagggaactcagtgacatgacatggaattggagcataaaatatgagtgtaatttttggtaatcttaagtagaattgatacagttgaacagatgaagctgggaaaaacatccagaaaagttcaagtgtagtcttgtaggccatttagcattgtcttcagttttagtgtgaaaatggggttgatgattagcacctggttagaaatggcatggaattcattgtgatttcttcaaaatgggtttttttcaacacgaaagaaggttgattctttgagaatttccctgtcttaggggtttattttttgctttagataggatagttggatcagggttcttgttgctttcttctgctacttctttatatagtatggctttggttgggatcagtaaccctgaacagatggggtggtttgtgcatttgataccaccattagatgctgcttgtttgaatcatttgcctgcaacgctataactgaagagttcctttctaatggaatcagcctctgtctgttgccactctgaaatgtggatgttggatgtagattaggagccatcgatgtgtaaattcaacctgtagaaatgaaataggtgaatgtgctgtgatgtgaaatgggtgggggaataagaatcaaaatttcctcagtgttttataatttgaagatctcttttaaaatttatttgcttagtacttgaattttgaaaatcatcagaaaacctttggaatctgatgcctaaaatctaacagtgaaacttatacaatttatgaaaagtgtttgtcatgtgtgcatattcttgtgtgtaattttttcctcccttaaagcaacaaaagtcttacttctttccaagccatgcaaatttcattacaggacttgggccacaaccatttgagtgctgctaaaatattaattgaatagaaatgaaaggccttgccaactgataggatatcataatcatagcctctttggtcaatggtaaatgatgataaatgacattaggaaccttttagcaaactgtaataactacaaggagggaagcagtatggatttgcattatatctgataccctctagtaccaagtggattgccaatactgcttgtttagcattttctaagggcaataggatattgatttctgacttacaaggaacagctctattttcaccattgaaaagtattgcaggttgttaagaagaaattgacttgaagaggccgactgctgcccatcatggagcaaataaagcaaaactgccgaagcatggtggagcagcgagacgggccctcagcaatttgttgctattaatttaccatgctcgacagcaaatcaatcggcatctacttcatctgctggagaaaatgctgtccagggcagataaaaggctcggcatggtacagagaatagactggcttggccaaaaggaggctgcagttaatgtgtaaataagtgaaatcaaggccactgttgcagaggaagcagttgttaattaggttggtgctttttagtgaactattttagaaagcagcctaggatttggagaataaggagagatttagtgaagttgaagtaatatgtgactggcttgacattccagctttgagtgcacttgattctaggatgcagtcaatttatttggggacagtgctagcagtagaagtcaatttatttaaagttctgttcagagcagatttctcaagataactttgtgtgggggggaattaccgatttcttatatatcttatatatgttttgacttggtgagcatgtagataaaagtaaaatttttaagttgtgtcttttctgaaatgagtatggctaaattcttaagtatgtgtaaaaaggaagcattaacaaaagttatgtattttatttgaaaataaataataaacctacgaaaattttgcttacagaacttctgttttacacccattatggaataatctagaatgtctgaataagggtggatattactgggctgggagattttaaagaggtatgcaagtaaaattttgatgctctggcgtaaacttcaggagaaaggaagagaataggagctcatgtttgttcttgttttaagatttctgatcactgatagtgttttgtcattaatattaatggtctagaggtttttggttgtgttttctctttcacttacttctttgatttggatgttttggagtaaggaccaactttactcctgtgtggtaaatctaaatgtatgtaaaatttaaaattattttcttcccaaaattgccagaggatatagcattgtggccattaataccaggtggcagcttcataggcaagaccccgtaaactacttttgctcagcaaaaggatctagaacttgaaatttaccccatgagggtgtatatatgtgttaagggggctattttctgaattctgtggattcctccattttttcatcttttatgtaattttttttttttttttggttttgaggcaccattaggaaaataatctgtagttttttttttttattgttgtttttttttccctcaccttaagtagtgattgtgggggtggaattaagagtttccttccagtggaagtgaacatttattatatatctggcatttgcttactaaagatctgggcatactgccaaaattctttaattctcataaagaccctaagtaaagggttgtgtccaatcaaagggtgattaagcagggtcagatctgcacatggtgatacagtaatcggtgctggttggaatgattgcctgagaggctgccccgataggaaatgaattggccactagttagagattcaggcccaagctcattgctggaatggagactctcctggctgctagaatagtctttgattttgctcttgagcccctgaactttttatttccacccagaaccccttgaagagtctctgcagctccatggtccaaggctgaaactattcaggatgaggtactctgtccagcaggctgcctcagttggtgagaggtcctgggtagctttcccctggtctcccacttgtcagcaaggagagctacttgctgtttcttgtaaggaagttttgtcttctccccaggcagcctgtttcttgtttatttacgaagggttcttctgtttaatttatcttttcctgtggcttcttagactgtctgaagacaaggggactgtttgttaatcatcaccttggggtttttgaagggggaagctgggagaggaaaatgtgatgttttgtggcctctttgttgttcagaaagaggttcttagatgcaggaaatcacacacaactcaaacttttaaatgaaggcagatgttttgcttttcctgttgaatttctttgtaacattcaaaggcatatttcttactgcccctcaatctctgcttccagttgtttattttacttatcattttgattggcaaatttgtttgcatttaggcagtgtagctctgagctgtgttggaataatgagctagacaagaatgaactccatcttaggtgcttcttcagtctcagtgaaggctccttgctacatttttcatttacttttcctagaagtttacttttttctttgtcctacagaacagctaaaggtagttggtaattatatgttaaacatttgttcttttgtatttgcttttaatgggaaacttttattgccttttatatttgatagcctgggttctgactttggtataataatgcttttcctggctagagagggaaaaagagatgtgatttccaaaaggtactttcctttaccattcttcataccgtcttttaaaaaattctagaggcagaggcacacaaattttcatcagttttaggtcagtctttctacgtagtgaatttcaggccagacttgccagatagtgggacattgactcaaaaaatagtaataattaaaagggggccagagctgggcgttggtggcgcacacctttagtcccagcactcaggaggcagagggaggcggatctctgtgagttcgaggccagcctggtctccagagtgagtgccaggataggctccaaagctatacagagaaaccctgtctctaaaaaccaaaaaaacaaaaacaaaaaaaagagagagagacagagagagagagcggggtctggagatatggcacagtggttaagagtgcatacttgttctttgcccagcacccacattaagcagctcacaactacctgtaactccagccccagcggatatgaccccatcttctagcctttggttatctgcacttatattttctgtgcacacacatacacaattgaatttttttttttttttttaaatagagagtaaagaaactaccccattttggtaacagagacctggtagtggtcttacacaggccaagttttcagttttgtgaacagggctgttggaaagaagcaggagacagcacttttaggcatggacactgatttacactgatgatgacggcttctaaggcttaggacttgttcaaagtctgcacactgaagacagtttatgaaattattagactaagggggaaggccttagaagttttagccaaatgaaagatagagctgttttgactttgacttagtaacagctgtcagtgggagttgctttctgtctgtaaagagggatttagctggccttcatcaccacaaatctatataccccctctgttttcattggaattgaccagcagcactgatgccaggctcttgctatttctatatcatagagccaatactcacctccagagagctgcagtgtgtaaactgtacttcatccagggggacagatgggcacagtatagattttcttagctcgtttgtcaaagaagcagagtgggaaaactctagaataccctttatttaggtactctgtcctctaggagatgggttatcttgtctgtcctgactcctcccaaataatgacatggaggcttttttaatgaaagctcggaccatggctgaggtttgttcttatctaattcgtatgacttaaattaacccctttatgttaatttacattctgccacatggcacatggctgttacctctcctcctgcacatcctgcttactcccagagttgtctctgctctgaagtcccatctataactcctgcctagctattggctatttagttttttattaccaatcacagtgatactttttcacacagtgtacaactatcccaccagaagctttggctggctgcaaggcattcagaactctgtaggaccctccctcttaactggggtcacctaggcaagttggatgatgggagggaaactggcaatgattctttgactctgctgcttgtttcttttcagacagtgtctcactgtgtagcctagaccatacttgaattcttaatcccccagtctcaggcttctgaatgctgaggttattataggtgtgagcctccacacctggttttattcttatttttcaactccatattctgcttcttaaggtctgtaggttcttttagttgcagatcttagaaaggcctggaaatacaactggaaagaacagtgctgttggaaattaaaaacactaatactgtgagacacctttctttgcagagagcttaaggcatttttcatgttcacctcagtcttcctgatgttcccataaagcaggtagcaagcttggatctctgtttatttaagtagcttctgttagtaatgtgccctatagtttgccaagcagtgtcattgctctggcctcctttaacagatgacactaaagcttaagggcttaagagactagcctagtgtgacagtcaggaaggatcagcgcatgggtggggataccagagttcagaaaggtcagttgaataggcctgaggtcatataggagagctggtggctgaaggggaaatagaaactttctttacttcccttccaaagttctcattattggccagactattttcaaataagtaatatgcttgtttctgtggtgttcttggctttctgcaacaagagaagtaagatactgcaggtggcagcccatgagtctttcactgtcgtctttagtgagagatctgatctgtgcacttgtgcctgaagttcaactgttcccccccttccctccacccttcggtgtcagtgccctgcccaggagtctgggatcagcaaattgaaatctaaagctaagatccacttttagcaaagtgtttaatcaaactggctgctccctcattccagaaccatgccacacaaacaggctgttctaggcacacacttgtttattgcctgtttccccttcccagctaccatgtaagctccacttttagtattgcattctgcggcacacccgatactgagaatgtgctggtgctcatggcgtagttggccaaagacggaacatttggatttggatagtagataagcctctgtgtgattagtaatttttcagggtatatttgggttgcaggatagacaacaagtgctgaacttactagtgaagtttgcaggaaaatgacatgaacaaagaggaagtgaaaatagctgaacttggggtgcaggaataagaacagttgtatatacagtagaatatgtgtattttggtgtgttcattgttttaaagttgaaaacaggaatcatttctaactgagtttaaagttcactttgaacatcattcttactaatcagtatgtatttgaagagttctagtaacaactctgtgtacatgtggcttgaatgtgtattgatcttaaatgtactgtggtgtgtttgtagtgtgtttgtactgagatgtttcaagtcctctagttcttttagagggatggggaactttggagatgatgatagttgtagtgagatggcatagtgttgttgaaagattaataattctaatagtaagcaagtttccatagtttattatgcaggtgatctttagctcttttcctggcaagcttatgcaattatagcattagtactactaattccaactttacaacatgtgacaagtcagagagatgtatagagagtttaaataactgcagtagggtccgccagccattgtattttggttctggagacatagctgagaccttgcatatcgtaggcaagtactctgcgacagctaccctcagctcagaaagtttctcgtaaatttttcttttagatttttaaattcataattgtctgttagttcaagaaatgtatgtttacatagtacttcatattttgcaagatgctttttccgtctctcctttaagctccatcagtgacaaaattatcaccatcttgtccatgagtaaactaaaacacaaatgttaggtaacaaagtatcatagttaataagtagatagttcagagtgttttaattctcttaggatcagttttcagggtaaaataatgttcatgcagacttagagcagctattggtaaatatgtatctaaaatgtacaagagctaatttaaagtggctaggttttgtatttttttctttggtgttactgtttagatttcaaaattgtatgaattacaatgtgatttgtaataatttcttctaggataaatgtgcgtagagaaaatatataggagtttattactggttgtataactagcccttgcgattacttctgaagtcagtgtagatgtctctagctgaggtttatctcatggcacttggaggaaggatgtggctgatggtgagctggacagctcagatacttggagcttttgtgccttgttctgttaggaatctttactcagggaaggtttggactattcaactttgttaagaatgagtttatcattttaaacaaatagagaaatgtttaatattggctttaggattcatgaacttagtagaaatcaacttctttcattaataaaataaagtctgaaaaaggaagaatgtattttatttattgctatgcctctggcacttaaaatagtacctggaacccagaaaaggaaacaaatgactttatgatggaatagctaagagaatggcttaacttttttactttttcctgtatattctacagcacccctcaaagtaagtatcagctacccatgttttctttgtttctgagctcttagagaaaatttaatccttatgatgagcgaaaaggcttcagataggcaatgagaggtaagagtatgatttcctactgccgtcagaagtctctgagcctgatgactggtagttaaaaaagtagggttggacatagggagctagctgagagtacttgttgacctaatgtgcaagacttaagatccagttcttattaccacaaacaaaatgaaagagggtagaattggttgactatcttctatcattaatttttttgttttaaaatttatttcatgtgtgagtgttttgcctgcgtgtttgtctgtacaccatgtgcataaagtacccacagaggtgatgaggatgtcatatcccttagaactggaattctggatgtttttgagccaccacgtgggttctaggaattggatctgggtgatataggatgtccctccatatgttgtgaatatgtgttttattagttggtaaataaagctgatttggccagtggccatgcagattatagctatgcaggaaattcatatagttatagaaagaaagaaggcaggttggggagatgccatgtagccactggggaagcaagatgtttggtaaagagccaagaacctcatggtaaaatatactataatagaaatagaaatttaattgttagagctagtcagtaatatgcctgactgtcaaacaattaccattaatattaagccttagagttgttatttgggaactgacaggcgggacgagaaacctccaactacatctgggtcctctggaagagcatccagtgctcttaattactgaggtgtccctctagctcttgagttatcttttaactctgtattatatgatgccatttcagaaagttaaggtttaagataatgttaagtaaaaggaaatacaattgtttttgtttgcttgtgcttttggtagaaattttgtctgaacaatgttaggatattatatacagttctaataattatttgttgctaataattcatgatctagaaccatctattatgctatggactattatgtttaaactttattaaactttattgaacagttatgaccacatcataacagtcctttttctaagacaacagttagagtgattgagagattttgattgctcatcactgatcataaatccaggttgactgagtaccctcatgggtactaggatgcaacagtttattctgatgtcttagtttagttctccccttcttgatatccttcttgcacttgaaaccaagataataagggatgtacagttagtaggtttcaggattagtatttaggtcctagaaatctggcttcagagctcaactctgaaccaccggcaatgcctgcatcttcagtgaacctttttatgtaaggtttcttttttggtttgtttgcttgtgtttttgtttttttgtacctggtagactgctgttgtgttctaaatacacctagcttgaattattacaagtggtagtgaatttgatgaggtctttgtctgtctgtctgtctgtctgtctgtctgtctgtctgtctgtctctctctctctctatatctgtctatctctattttgcaagcaagtgtgctaaattagtgggtctaccttttttccctccctccctccctcctccccctgcctccctcctccccctgcctgcctccctcccctccctcccttccttccttccttccttccttccttccttccttccttccttccttccttgattctgtagctggttgtttgcctgatgatcacagggtctggatatttttattccctcctttttcttctaaacacatgagaatttttagatgactgcagaacttttgagtctatctggagtgatgatgggatggggttcttggcacttggatgttaatttcatgccccaacccccaaggtttgctgatctggagagaaaacttaaggagctccagttctagaacaggagtctcaaaccaaggccattctccaggagacatttgatggtacccaatgatacttgaggttgccacaatttagtgttagcactggcttctagttggtggaggctggatactgctgagtaccgtgtagtgcaaatgacagtccctatgacaaagagtatccacacaaaaatttcagtagtattagggtgaagaaaccgctccaaagagtgaagtattcattctagtgcatttttatgtttgggcacattatgatttctttgagtaagagatagttcaagaatcagccttgaatgactagtgaagagtccttcaaactctacttgtcttaagtctttttctccttcctatcctggtgctaaactcagtggagttgatgggagttttatcaattttgaatggcgacattatattacatgatctttttgtaatcattgttttcctaaggaaaggaaggtaataaaatcctttcaagagtagagaccttttactcttcagcttctggttggattcttgatttcatccagatggtcattatgctgctattatgcaagatggaaatttttttttcattgataatagtggtcgggcagtattacgtgaggcccttagaaggcactagaattatcattacccttttctaggtaagttttcataaagattgatttttcagtcatcccagcaattctcctgcgatggcaacctgggtagtaccaagataaatattataaattgggccagctgagaaaccagtagacccctttgcttggtttgccttagcagagggatcaggacacatcttgctgcaaaatagcttttttgtttttttcacttacgttctgcttagggcaaagtacagtgtagttgactttgtccagttctaatgcaatgaaatggaatcctgagttttctttataaatacttaaatctaaaacatggttaatgtcaatgtcacacagaactagagttatatgaaaggagggaacctcatctgagaaaaggcctccataagatctggctatagagcattttttttattagattgatggaagaggacccaggccattataggtggtgccacccttgggctggtgatctgcaatctataagaaagcaggctggacaagccatgatgagcaaaccagtaagcagtgtccttctgtggcctctgcatcagctcctgcctacatgtttctgctctgcttgccttctgcttaccctccctgctttgatgataaactgctgtgtggaactgtgagtgaaatgaaccctttcctttccaagttgcgtttggtcatggtgtttcatcacagcaatagtaaccgtaactaagacacataatcagtgagctcgtgaggtgttgccccaccctccacagtgtttctctatgtatccttggttgtcctggaacttgctctgtagaccaggctggcctgcaactcagatgtccattgtgctgtgaatttgggagacttaaattacacttgacttaaaatggccaagaaagagtaacaatttcacagctactccattgttttaacttttctttctttctttctttctttctttctttctttcttttttttttttttttgtgaaggtaggggtatgtgcttatttaggcttcttgatggagaaattgtggtctaaaatttttaaaataccttaagtaaaaagacctcttctagactgtgaatagagggtacactgcaactctaacaggaatggtcagtttggatggagctgggtcagacatagcacatttctgtataaaatgctagctgatttggtaaggttctgcttttaaccaaatagaagtggaatggatagaattttttattactttaagcatcagtttgaagaacttttgtttgtttgtttttgtttcagttagggatgtaattttgtaagataatgtacatccctgcctctaaattgcacttctcagtctcttgctttctttagtatttgacattccttacttacttttactgttcccttttatttatttgaggttcactgctacttacatgtaactgtgcacatcctcctggatatctcaaatcatctctcaatacttaaattacataacaacagtgtattgactgtataggtagtttctatattgtattacttaggaatacccagaaactgtctttataaattgacatagttagcttcttaaagtcaagtgtctaggattgaatttgtaaaagttaagattgtaacttacaaacatgaaaaaaacctagctttgtagggttacattattccctggttagaagggtttggtaagagattgtagttctgggtacatcaaagatataatggcttttatatttttttatcgaacaacagttacttagcctcatactaccacttagatggtgctttgagacctgtaagagttataagaggtaagaaggcttgcctcagaaaattctaccttttctcctggatcagtgtaaacagtacagtggagacacttgtgatagaaaatgacaaggaggtcatctttctggttctgggactattagggtgctgttatggaaggtggtagatgaattttaaggagtgaagacctcttaggcagagagaacagaaagggaaggattctaagccacagaatcaagaatgttctatgcctgttcaggctgtggttagcatttccaatggtagacaagagagtagtagaagttggtttaggatgcgtttattattgaaggcctcaaatactagaaagaatgcttggactgttgaaagaaacataaagagacaatcacatgaaaacccaggaccacatctattttcttggtgtgttcttctctgcacctagcttagggtccaagagcaaacatcagtaaatgttgattgtagctgtgtgaataaagagacagcattgaggaggtgggtccttagaggagcagtagtaggacgaaaaaggagggaaccatgtggtatactagtcatggttttggtggtactttgtagaaggacccaagacactgtcctgtacaaggtgggaaaaacatgggacattagcagagagatactgaatggggaaaaactggtgtcaggtgtattgcagtatgagtgcctaggaagaaggtgtgaaaggaaaggagggaaaggaacagtttgttttttcatttctcctggtgctgagtctgctcttctctagacttctaggattccactgttagtgcttgtattctatacccagaccacaagggtgttagctaggcaatcctttgtggacagtggtttgggaaatatttccttttaaggaaagcatttggccactgggtgactttgtaagtttctgtgaatcatcaatatgaggcatgcattatattttaaagtattactgtaccctttgatagttattaaacttaagcttttgtagttgagtgagaatagcagttataatgagaaaagttgaatacacatgaaattaggaaacccatagagaacattttggtaaaccaaaatattgcttggtggcataaagccaccaagatctggtccaagggggagtaacgtgtggttttactgctctgtcatgtagtctgttgtaactgtcagaaacatacgttgccttatggggtgtggatgtcttctccaaatctgaccacagctttaaatttcaacatcacatagagctagtgttaattggggccaattgaatgtaatgacataatcgtcatcaatggtggtagaaatgttttcctgtgtgtgctcattatggtctctatccttctggatgctttctctaaatacagtaatgtctttgttcttttcactctaagttagattgagttctttaaagatagggcttagattctttcctttgctatagaaagtaatattaaaggaaattatatatttacagaatttcaacaagctaatgaaggtactgtgggccaggcaaaggccgaagactgggactgtgcagtctccctctatatactgactgatgaggctatgtctctttggtgaattcaccagtcaggtttcagacatgaatacttgaaataaatagtgtgttttcatttcattttaaagtgtcaaaaagtgtatcattagataacttgataaaaattattcagactcatctatactgattatgcacaaatacctttatcttttcactgctccctaaataataaagtgtagctgctactcacacagcacttacattgcattagatattttaagtaatctagagatgagttacagtttataggaggatgtgcatagctcatatttaagtactagacccttttatgtaacctgtgattgttggtactctagaggtcatagaggcttccctatggatccttgctttgtgtatatatagcttggtggtcagaatcctgacccagtgacttgcttacagagaaagtagtggtttttcgttttttgtccacttctttgttcactaaagccctgtactaaactgtcacttccaacccttttcattttggtatatttcttagattgacctgtaaattcttagaatcattttggggtaagtagtcaaaaagaataattttggagaatttataaatataagttaaagcacaccaatttagaagtattttgttgcagaagttcaaacatacttacacattcatgctagttccagtatctcttcttctttttttttttttttttcctttttggtttttcgacacagggtttttctgtattgctttggaggctgtcatggaactagctcttgtagaccaggctggccttgaactcacaagagttccatctgcctctgcctctgcctcttgagtgctgggattaaaggcatgtgccaccaatgcctggccagttccagtattttactgactattctaatcttaagtttcatgttattttcaatgtctcatagtattcagtaagaaaatactgtttatgatttgtggttcatctccagcctagtgagcaatcttcctagtaggaagatccctgaatgactttactcacttggttcttaaatagtgttctagatggggccatttaacttctctaagtcaggaaggagggtaagaaatgttctatttcttagggctgtgttggagaagcttgctgccatgaagacacatagactaaaatttaaagacgttacagtttgggacttaggactgttactgtggtgtagttttacccagagcatggtccatgactgcagcagctctgtgaacatttgataaaactgggcaatgagataaggaatatactggaatataagtgaacatgcagcttcttttgtggtcagtgtctttatctttaaaacagaaaacaagaaaaacccaaccacctgaactaaacagtaactgatttacatcctggctctaaacctctttttgtcttgctaattgggggtggtagggtggtggtggtggctaactttttagaatatgtagtcaatcaaaagattcatcagggttatttataaggtgagcatagactgagattgaagttcataaaataaagtgtaatcttgaatacaaagtaagttaaaggtctgatctaattctagggggcatgaacatgcacagcatggcccagacatttgacagggtcacaagttgacagctcttgagggcattgcaggttgtgcttctgtgaatataaaacttgtttacattattctaagtactcataaattcttttttcagggatttcttcttcccccacttttttaacccatctacttaatgaaaagaacatttctacaacttttattttgtagttttaaattttaggactgtgttatcgtcagagaaactttaaaatctctcccaactctccattttgcacccagaagctgctgttcctccttactactatgtataagttgtactgcacccagggcagatatctgtttactgagaaaacaaaaagagatcctatgtcagtagcagaatgtaaatactaagaatgtcttttctgggtcgtagtgcatcaaactggagagacagcaaattttctggagctggcctgtgacctcactcctagtcaattgaggaagaacttgtctctcctgtgtttgttactgttgtaccaatgagtctgctaccttagatctttctttagccttctcttgagctctatagcccttcttcccctgtgtagtgtaaattagtgagggatactttcttaattgagaatagagagaaccctgagcttcaatcaatacctaacaatacagccactcaatttattatactatcttattcagttctgtcctaaagcaactatttacgtaaaaggattttattcaaacatcagtccacataggtacttctgccaatcatacctgccaatcatacctggggcaactcttcttatttcaagattgtggaaatggaatttggaatcacttgagagtttagtcatggctcagctaggttactaattagaaaatcacctgcagatctgggaattcatagctgatgatttgtatcttctgtgttttcaaaatgttgtagtcactttaggctgagttgttcccatccctttccataattattctccaaaacaaacgttgacacaagcctttggtttgcctaccttgatgtgtagctgtacattctggctttctttttttgcttcatagactccttctgttggccaaatccagtccagccacgcatgattctctccatgcaatgtgtctccttgccttattgtcactctggttaccattattatccattagacctttgtgtcagagactctgctggcttgcttcctgactgtcttttcagtagcctttgctgtctcggtatttctggtcacgtttaggagcagtgaaaatctgtattctcagtatggactattctctctgatgctttatctcattcactgttaagtagatgagcttggccttccttttgttgtctttctcctttcagtgtctcataggtacttaaacccaacatgtttccaaaagttacccacccccacaagcctgctggagatccagtgagcttatgtaaagaagtcaactaacctgtctacccagtttcttcagggacaaagtcctcagggggaggacaagatctctgcttttccttcttactcattagctagctacaccatgcatccaggccacaggttttctagaatctgcccctgttattcctgcttggcatttctttctctctggctgtctttctgtttatttctttaacactttactgttcttatctaaagatagggacaagagtcaaactcttacattgctctgagcataaagtgacatcccctgcacaaagctggttctcttaggatggttggggtgacctcatgtagcattccttgccaccatatttaggatcactcactgtgagtacggaaatgtctaagtggtcatagtcctggcctctaggctgtctgaaccacttctagccacatctgctgctactgcttttcctgtgctgtgagagcgctaggctggtgtgacaggcttcccctttttagaatggtcttttcttgccctgccctctatcttcgtctttcagactcactttatcctggttcctcaggatagcattcatgcctaaatcattgagaaatactatcatctcatttactatattatgggctttgtaaatcctatctgttcttcccctattttagatgtgacatggaatctgaaagagaagtagaaaattattaaagattgaggacttaactatgtctcacataagggattttccccactatacttaatcctttcctcccagagtgggagattataccctgggctctgcctgtgataagcaaacacattatcagttatctaaataaactgtataacccaatccctctttctgttttatatcctggaacagtgtctcattacgttgcacaggctggccttgagcctactctgttgcctagacaggctttgaacttttgatgctcctgcttcagcctcattagtacctgggattacaggcctgcaccactaggcctggcttcctgtgtttatttctatttgatcttcttccttgctggactgtaaacacctcatggggtcagagccttctgcattcactacactgtgtgttgcagctgctagctcagagcgaaagccaatatctgaaatcatattgtttcatttcttatgttaagggtgctttgagaattttgttcttgcttgaaaattatcttttaacatccatctttttttatgtttactatctcttttccatagccattcaagtgtaatctgtggcaagaagagggttagaaccctaaaggcattgagatatcttaacatgcttataatttgctaccactttcctagaaattgtccccggtagatccttgctacctaccaagttaaattcaagctctggagtatggcattgaaggcctgccctgccagaccacagtagacagactgcttctgctcctctttcccttgacttttactgcatgtattctgtattctagcataatggttccagtcctacttgtgtgttagaattacccagggaattttaaaatggagcactggttcccgggtcctactcttggagattttgagctaacatatctggggtgaggtctggtttgtgaaatcgctaaccaactgtttcctgagaatattgtcttctaggaggacttttagggttctatagtcaaggacgtttcagtaatattgctttttgtgtatttcattccaaagatagtaaactaatactgtcaaatgagatgctttgaggtgtctgatagggaagaaagctgtttaattttgtttaggcagagtgaggccatgtggtcagagagcactttgtagatacttacttgttaataacttgtgcaaggtgtggtatagaacctgctttgggaggtggtattaccaaccatgtttcaactttgaaatcacttcctcttatcctttcctgattattctatccttaccagactcacccttatcctaggattgtcttctttatagatacttttcaatacctgaaattctcttttgtatgtctgtgtacatgtctttgtctccacccctatgctttgaacttcagggcagcatggattgtcttgttcacttcactcatgtctacactcagcacctaagagttctgacaacattaagtagacagttaataagtacttgttgaatgaataaaaaggcagtaatatattcatggtttaggcctttactaaggtgcacatatcataaatctcatgcatgatataatttaaaactaccttgaaatatagtcagtcctctatgtgcatggctctatttatgtgtgttccactaactgcagattcagtgtattggggagaaatgtgtctgtactaagcacatgtttgtctgtcattatttcctaaacaataaagtgcatttagccatttatattgtatctacattctgttagatgttatagcaagagggtaatatggatcctattcaaatactttgccattttatgaataataagcatctgcagatttgatgtctgtagaggctctcatcacaaatccctcatggacagggatgacggtgcattctaaaagtagattatagaagcacaaatagataattgtttttacctttacttttctcaacttaccttgtggagtattgaaaaaacacatacatatacacaccacataaaagtatttagaagccagactacagggaacatttgtgggttttatggttactggggcaaggagcatctcaatctgttggatgagacttcctttttgctgcttaattttaggccactctgtttcagatggctttccccagggaaaagggattgatcaccccagcatgagctgttgaaagaagcttggatgaggagtcagtgagttaagagtcccttttgggtagaatacactataacaacaacagcaacaacaaaaaaccccaaaacaaaagttaggcaagattatttgttttgtgttgacaaagaatttttctaatttttaaaacattgaacaagagtgtatccaaacaggtttgtcaagtgcattgaggagcttgtttggataccagaaagtagaattctaagtttacctgattgatgttcaaggctcatgcattaaggaacattgtagcaattcctgcccttgttaagagggcacctattctggaggtactgtgctgcagctgtgttcatggttcctctagcctggctctcataatctatttgaacgttttaataggtatgaggtgggttagaatatactaaaccatgtttagttcccatcacccactgcacattgaattattaggagctgttcttttacttcctatgagccctgtgagcctgtgatgctgcagcatgactaaggcctttctatggactgttctaagcaaattgatttattccaggtactgttctagaatttattctgaactgtgaatacaaaatgctctcatagtgtatcttcctgcagatgtgctgaatgccaaaggctcagatgattagtaatctgctgcaagcaatattagaaggaggctaagctacatctgcattctgtttctaaataatcttttaaatcacatatcctgccaagaattcagaatggaaactttaatcttgactcacaattcagaagtcatccagaataaattttcattttttcctgtccagtgagaatatgtcttattctttttaaatgatatgacttcctaaatgtcagaaaagtatgtaccacaaagccagacaaaccaaattataatgtgagtaggtcttgtagatggataatcctttatggttggtacattgatgtgttttagctcttccataacaatttttgcatgcctacctacatgcttggcctggattatacttcatttacaaaatgatatattaaatgtcttttgtattctagtcacattgaatgcacttgttgatcacatggttgacctcatcaagctcatatgcattaaaactttgctattctgcttgagttttgcctgttctatggaccagcagagtctctcagcagcatcttggaatttgttcaggcctgtcttttcaggcccaactccatctgctttataccaagattcccaggcaattggtaaacataatgattccagctaatgacatgctgtcaagacacaaggctggagtgggtcaatgagtagaatagggattcttctgtgaagtcattggagtaataggatattttatggactgaggcttaacattatggtgaggaatgagtcctgggatgtctggtaaagatgttttaggtagcagggtcaacaagaagagatttaagaaagtctctgcctctgtccttgaaacaccttccatacaaacaggcccaggctgtgactcacctgttctggctgtcttaactgagcactataacaagaatggatgagagccttgtatctgggcaaatataggaacaaatcataactttgcttttgatcagactgggtactcatcactgtgggaaaacattcaaaggactgagaggatgctttggcagtgatagcttcaactagttgaaatttcaggtaataagaggatgcttaaaaacaatataaaagactgtgctagtgttgagaggaaaataaatactcaggaatatagccatagatggagaactattgaaaaaaaaatgatgataagcaagaagaatacagataaagacggtctaacctaaccagggtgttgtccagccttttggcattgaaacatgattttatctgtaaatgtgttcattcatagctgtcttcggatatatgctgcctccaggtttgacatgcctggatgtgaccagggagaaatagccaaatcatctggcatgattttccctaagagatggcttcttgttttcatggatatacagtacaggcatccctgtgagaccttgataagtaccatgagttggttttatttattcctgaattcagaattcttcactttgggtatttctcacatcattttgatcataatcagtcccgttggagaaaatcaagctgtattatttccatttgttgtcacaggagtagttatccctatgcctaagtgtgaaaatgtgtaattgtaaattagcattgaaaggccccagtatatttatggaaggaaaaggaacaaagtagctgacattccttgctgtgatactggcaggggagtgttgagggcagaagcatgtcaagagcttggtgagcacaggtaatcaggttctcaaccagctccaccctgttctgtgaagacttaagttaaagttactagagaagctagttttccttgcctgctcctgctgaaccccactttccgctctcaaccttctttctgtattcctcacccttcctctctgaggggctgagtacaaatgataacattagttacactttttttcaaacttgagaacagcagtgatttgaccttgtatgacttactgaatgtcaagcacaaggatcattactctttccctgaataacagcattctcttgatcccttgtaatgctggagcaatattaaatataatatcaaagttcaggtaatatggtaataggtgactagctgaggttttcttcaaagaaatacttttaggaagctcaaaggtaagagggaggagcacagtttaatagtggctgagagttttcataagacttttgggggccgattgaaatagtttcatgagatatagaaatactcttctctctcaaggacattgtcctgcatattgctgtccgagcaccaccagtagtaccatgtatcttgttaggacacatggggttgtgcattgtcacttggtagcacacttcaacatgcggtaaaatggcatacagatgagttcaaagcatgaaccaggttgacattgctttagtgacaccatcagtagagactttgattctgtggaactcactgagggaagtgtgaagaagttaaaaaaaaagttgtgtaattgatactttcatattttcaatataatatgcattgagtatccagactgttttcttgtaggaggaagtgggatgggaagctcttaaaaacagtcttcttcagtctgttgtatgtacaaagtgaattgtaagacagccagggcctgtccccaaaatccaaaataaataaacaaatagattaaaaattttaaaaagccttattaccttgcaaaaaatgtttttcatgatgtaagatgcttattaaatttttcaacttgtctggtagaagaggtgaaatgagtgacttgagatttctcctgtgtttcctccattgttatgactgttaatgcttctctcccattcttcatctcttctctagagttagcacaatggcacatagtaccaggtgttgattgcatagtcaagggttttcataaaatggcttttttttttgttgtcactttttctaaggtattttgccaaaacacaatggcttttttgtttgtttgtattttttgggggggggttggcttttgagcagggaagatgctcatttttattggatcttttcattggaatgtgatataaaacaaaataaaaaatagtggtgaatcttgggtaggaaatgtgttaaccgtatttttttattaaaaatttgaaggaaattttattagtatgagcctgatatatgtattcatatatgtgtgcaagggccagtgtgcacagaagagggtgtctgatccttttgaaatggagttaacaggcccttgtcacctgccagatgtgggtgctgggaatggaactttggttttctgcaagcattttttaagggtcaagctatttcttcagccccatcaactgcttttcttaaatgtgtatctttatgattagggaagatgtcaaatgttgtttaatgtatttgacaaagtatgagggtctttgtcatcttttaatgtgaacaattgtccttttattaggactattaatgttgatttggagtatcatgggtactaaaggcagtagtttagcagtgcctgtaaagcatcaaactataataacacccagtaattccaacaacgaacagtatttcagcctctttgcctttttcaatgggctatctgtgaatgcattgctcagggatgcatgacccacatcacctataaatttgattggaagccaaagaactggcataggctgatggatagcagattagagtcctgattaaccatgtgattcaaagcctggaaatatattgtctaagccagattcatcagatgcaatcagaatttcaagtggtcagatgatttcaaacgtgtattgtggcttttcctcctaggttgtctttttctctttccctaaagctgaaaaatacttctttgatgaatctgcttcttaccctaaagctagctgtctgttattcatcagaaagcaggtcgcagttcagtgagcagaagaaaagattttaatagaagctgtgccaagggctgtaatgcatcattttagggccctaattacattacaatgacaaatatcaatggtgacaacagcaataacctacatcctttaatggctgtgctagaaaaggagtttgggccccacgccattagattagactcagtttcaaaacataggccattagaagtgtgtgtccacagtattactggttgatcgctgaagcccagtggaaaggcctgaaaataaatgatgcctccccaaagcttggtcttgtgggacaaaagaggtgaaattagatgaccatggaagcagcagtgtttccgaggaaactttagctttcaaagtgaggaatggcctgcttaattgtatgaaatcacacagatataccccacccccttgctgccaattagcctgtccatgaaaatctattagcatgacaggataaagaaattaagaagtattttaaacaaaaggagacctgtaaagaaaaagtttgaagattttacccttctttttctgtttgtgtgtatgttaacatacataatttttagtattaagacttttttttttttaaatcttggtggtttttttgttttcgctttaaatgggtgcttggacttaaaatagcttattaaggtgccagataactcttgttttttatttgaccagatgaatgagtttcctgagtagtttttactgtctacattatgtaggcaaattaaagaactcagttttcctacatgcccacgtacttttttttcaacctagcaagggactattttatttatgtaaacaacataatgaggaaaatatgcttggcagatggttctaagcagaagaatcatcagtttggtctgccccaaagtctcattatcttttattcctacccccacctctccttacaaaagcctaaccacaaaatgcctttgagacatggagcattcagcctccttattgctgtctgttttcttaacttaccttagaatttaactccatcaccactgtggaatgttcatccaggtggagagtggtttggtggttcccattgcagcctttcatggtggcttaagcattcttaaaggatggctaaatgatcctaggggccagggcagtaaattaaatcagggcagcacagtggagttttagtcactgctgtttactggttctgggctttgtctttctttttaaatgcaggctggaatggaaagccaacattcaggacttaatggtgaatttttgttttgggttggctgatgaagtttttaaggtgctggcatttaagaaattgcatagctacaaagttaaaagggttgctgcaaaaagaagaaagttgctgttctataatgacttaggaagaaaaagagcatttgtgtgctttcataaaatgaattggttctggatttattttaagaatgtctcaggaatagtaattgcttcacattttctgtcttttaacatttcttaacctcctctttacaccaccccatcattaaatatgagtaatttgtatgcacatatgtgcatacattaaaaactgtctgcttatcataaagtgtagaacatgccatctgaagatgtgtattaaggtgaaacatcagtaaagttctgaacaggttttttaagaaaacatgtaatagcacactttttttttctttcttgtgttaaaacccccagtgtgcaaggtatgtacatcttgtccctgtatttctaaaaatacaaagaatagcttctatagtctaactgttacaacttttgcaggtctatagtaaaatgataatgaaggtagtcttcagactcagattgctctctgaagaccttagcatgttctgaactatacactgaaaaccctggttgacagatttgcaagcctttactgtttgaaaatattctactatttggcaattaagaattacatcagcttacttgattgatgctgttttccccccactcttcagcccctaggagattgggaactaagtataaaaatcccactgaagtgttgacaagcaaaggctgccaggtgcctaagattcaggcactctggaggctgaggcactcaggttgttaagttcaaggcttgcttgaacttaagagcgggtagggaagagagaaatatttttacacaattgtggaagtctaatcatttggttatggaaacagttgggatctgtatagaaaaaatgtgtgttatctgaattaaataaagacttggggtttaagaaaaccattagattgggcaagggtccttctgatgaaagctttcaaaaactggtttctagtcatgaatattaaattcactttttattacccttgcgcttgaggattaaattttaagatgaatgctgtttaataaatcctgctgctaatatgactctgttgtcactgcctccttttaatgggcttgcttggaaggtggttttcctcttccttagacattgccagccagagtacagtatataaacctgttaatattttgggtatctataaccagttgactactttatctgttgtgtttcttttttgcaggcagagattgttaaacgactaaatgctatctgtgcacaggtcattcctttcctgtcccaagaggtaagatagttgatctgatggctagaggttgttcgtgttttattgattctgcagataagggactgtagacctgattctggccttgttcctatttcatatttctaagatgcaattgtctcatcccaacttctgaaccttattaatatcgagtgtaacataatttaaatgtatttattaatcaaatatttctgtgttaagtaaaatttaatcgttaaaatattttgctgtcattattaaaagtagtgttgctcagaattatgcctgtttgctataatgccatccaatcacagagatggtaaaattgccagcaagacatctgtacatctgtacatctgtcactgagcattgagactcagtaaaaggtttatcagacagaaaagcttcacctagtgaactaatgggacttttggctgctgcttttaaaaagttattttaaattaatgattaattctttatgttgtctatgtatttagaaaagacatccaacataaatttcagtgtactcatttctgtgtcactttaggctttgctgataggcctttttatgggccagtgcctggcatgtggctcactagttttgttttgcttattaccagggaaagtgcatactgtcaaaaattcatgcaagtgtgcaggagggtctaccttcctagagcttgcttggtggtttccttgtgtccccctctttctttactttgcttattttcttgctttgggtaggtagaaagtttaggtgagaatactggaaaggaatggttttgcttttggattattgaatcctttatttgctctggtaatgatcagctataagaaggaagaactatttttaaagtcttgagaccacacacagtacttggcactttgtttttgggtagagtttgcactcccactctttttagttactatgttctatcactgctgttcaaaacagctgtttatactttctaacaatgtgtgtgctggggttagtcacaaaccagtatttgaatttgtacatgcattatacacatgtggatttctgtctgacttattttgtccaaaccaggattatatttgagtaactgttacactgaagaagagcacactctattcaaaaccttgctacttcctaattcaattgctgtttttcttcccttttagctgtgaccattaaacctcattatcctcatttatctatttttactgactatttgcctgtgactggattagatgtgttttgactaagtgtcaaggagcatatttgcattttttgttgttttttttttttttaggatttatttatttttatttctatgtgtgcctccatgtatgtatgtgtgctacatatgtgcctggttcctgaagaggccagaagagggcagtagatccctaaaaaacggagttacagatggctgtaagccaacaagtgaatgctggaaacagaatctagttcttctgctagagaaccaagtgctttcaacatttagccatctcttgagcccgtagtgtcatttctttgggaagcttgactgttccaggcctcacctagtgagtgtttcttattttaagaagttctacttgtggagctagagtgagaagaatgtgtgaagaatgtgtgaccctcaaagctgttaccaggttgcagtgtgataaccaaaggcagaagggaaaagttagaattatccctagggtggtgttactctttgggcctctgcaggtacagaccactataggcaatcacatggcatttctgctgtctgtggattgtagtcttggaggtacaagctcattttcccacatagttatgttgtttgtatgagcaggcccaggaggaactgaatatgctgtggtagcagggctaagcaagactgaaattaattggttgaggatgttgtaccccttagagaaaagccatgggggaaatattggcaactcttttctgctctcatctggagggtagacatcattctttcaacgtttgattatttgttttcctacggttttgacagttcttgattttagtccttagtacacataatgaccccacattatggtttcctaaatcctaattctgtgtatgtcttttcttcttttactcttctaatttcctaagatgggagtatacctcttaaaatatagccacaaatgtgtttattctcattgctcatgttctcatttgtgtttgagattgaacacagtctaccttgtattttagggtattctgtaagcagatacctcatttcttcccagaggccagatggaccttaatctggagggtggggaggcagggtattagagaaagaaggattctatttcctgtctcttcagtggcaggaaaatcactcttgcatggctacgggcatcacttagtgccaggactaacggatcttaatctgatcttttaacactagctctctctgtggcagtgttgctgccagaaaggcagctgtggcatttgaatttatttttaaacgttttatttaaaaattaaatgattctacctgggggaagaaaggaaggtgttctctggagactgtgcagagctacaagacagtagtcagaagtgttttgagcatctgaaagttgagtctggagtctgacagaaacaggaggtaaatttacatacatctagattatttgccttttaacttagctctgtgcattgattggttttgattgtgtatagtttatttttttccagacttaggaaaaaatgtagtagttaattaccactgttaaatttgcttggttttaactataaaaccttttctttaaagccaagttttagctcaaatatatgtacagttgatctatagttttaagattacagaataatagttttctaatatatttcactacaacattaaaaactagtcctaggctcctagtcattagacaaagatacaactgtctcttgctattaaaagtgaataattatctagtactttggttttagaatttcttaggatccctaataccagaatttagtaaccacgaaccgtcatctgtctgaaccttttcctcccctcgcttttggctattagatagatctgtactctgctttcagatttttgtcctcataagatacatctcacagtaataccaatgggagatctttctcatggtatatctcattttcaggcaacaaattacaggtaactacttccaagctgtcagttctataaagaagaaatgccagttgctggcagtcatacctgggttgagtcctggcatcccatctacaaatcacatgacttgtgacctttagcaagtactttgcctctctcagcctcagtttcctcatctgtggggtgagggggctccatacctgaggtatttgacatatgcactttcctgtgagtatagcagctctggctacagcagtgtgagcaaagaaagacctgtaagttctctgtggggaagacccagaactgcttctaaatcttgttgaatcattgtttttgcaagtgtgtgaattggttatctttctttctgatttccttcctgaaagctgaaactgagcccaaggagcctggactacctggacatctggttatttttcttaaacaattccaatctttgagggtcacattgaatgatgacttattagatttcaagtgttaaatatccaacacctgaattttgagaccgtttggagagcagttatatttttggtccattttatattcctataaggattgttttgatttaaacagcatacttcatggttctaagtgtcaacttgtagggtctataactatttatgtgtgactgttaaaaaattgcagtcccaggattctgaagttctcaaggtcttaggacacttaggctataggtctgtaacattatagttgaaattctcttctcagtgaacagttctattttgtagaaacttacattggtaataaggaacagagttcaccacaagagacagattatgtgaaaggaggcagtgtgttaagaacctgaactcagccagactctggaccaaattttggctcagctgcttttataacctacatggtatcaagggtacagttcctagtttctgtgataagctctagggctacctgaataatagggcttattaataagacttggtgggactggagagatggctcattggttaagaacactggctactcttctaagggatcagagttcaattcccagtacctacatggcagcttacccctgtctgtaactctggttctagagcttctgacaccaccatacatacatacaccttcatttctctagctccttgtggtcctgccctgtctatagaaatgggaaagggggggttgggtctttaaagtgcagaatgtggaagatgttcacttttactggcactttgcaattgtcccagacctagttacttgtccccacatagctataaggagactttgaggtttagttttccatagccacctaacactaaacctgctagccacctaaagctggtagtcagttctagatgtagtgatatccatttgataaaagtaatggctattattgctgctaaccatgttatgtatgtacatgacaaatattctatctgaccatatacttagcacaacccattttaattggtgacctaatttataaaataatgcatagttcttgctataaaaatcatatactcctggagttcaaatcttgatgagtagtttatacttgttaaattcatacagtatagaaaggaatacagtatatatgaacagttatgtgctgtttagtctatccaaacaacttgtagggtctataactatttatgtgtgactgttaaagaattgcagtcccaggattcttaaatatacttacttttcaattaaaggccagattatggcaaattatacttggcctgccatattttatagcaaattgctggaagggaaatgcttttctttcctttgatatcttacatctatcttgaggcagtgagattaaaaaaaaacaaatccaagcccccctccccctacaaatacacatcatgaaagaatcatactgtaggtcattgttttttatggagttcgaagatgtctttttttttttttaatctgcttaagtttattttgcagagttaagttgattcattttgattgcttgtattgcaaaccattttcaaatgttttatgcttagggaatttcctatagtacattttgatcatccccctaatgcctcctggatccattctcacttcccttctccccaacatcatattctgtgttatttagtactgaaatccactttgtactgccaaatatattcccgagtatgggcctgtccaccagagtcagttggcctactaggggccagtctcttaaagaaaactgactctccctttcctgaagctgtcatctgtgcagtgttcttcatcgagaactatggttcagctgtgtaagctcatgagtttcatggttctgtcgtgttcagaagacactgttttgctccagattttgctgacccctccagcctgtggttccttctgagcagtggctgctaaagtcccatctcttaaactcatggtcctttttttaaatctcgacatcaataaactgattagcttatttctaatcattcagtgctaaggagagtggacatttccttcctttcctccttctggaactccataggtaggtgttctgttcatgagttatttaaaacaagcagagctgcttgggagctggtggaggtgttgtgtaggctggacctcacagtgacaagaaaacttgcttggagtctgggcttacaaaggagcagagcagtttttcctgtgcatctgttattttgaattaatactggtttggtaaatgaaataattgtttttttaatacttaacagaaatgttcaaatcattagactttttagaccatatagtcctttacttttcatcttacatttacttaggggaaaggtaactttcaccttgaatgctttctggtacagagtaattccagctaagagttctactttccccatttacttgttaggttttctaaggagtcgtaccgtgttgtgaattttctttgtttcattgtttgtttcctcagaattttgtaggttatatttggactttttccattgcatttaataaatagacaatgacacacagttaaataataggggtgatatgtatccaatagaattacaattccaaatagtacatacatttttgtctcagctctacatttgtttcttctattgtgatgggaaaacaacctttctaggcatgtgatagagatgtcatttatttttggatgtgggtatagactcttctgaatcacattttgcatgtatagaataattgtgaaatggaagttgaaaaatgtcatcagtcactttcttactgtgccttatggaaagaatgaacaaaatacagtggttacccacactggtagcagtgttaccagtgtatgaatcactccacgttaactcctcatattgtttaacttcgtaaggaatcaatgacttctgataacatggtttgatataggtgagcttgactgaaataacccaagaaactctattagataggcacacagacatctctaagaccatctaaggaaaacatttgtaagtgtcagtagcctgtaccacacaagtctattggagtcaatttgtcactcttggtatcctgttccaacgcattctatgtagagggtgccctacagtgagtaacataagtccttcagaaagtttggtccagatttctgaattttgcatttaggtgtacgcagggtaaacatttaagaaattttctttaccctcacaaccctgagatatcagagaacaattctctcctgtgttttttggttgactgataatcttgctttccctgaccatgtgttttaatgataattgagtggcaaaatggtgggatgatgatctgtttgacctcaggaaataaaagatgactctcaggaggtaactttctttttctcctgcaggtttaattacatgtgggcttccctccaaaggcagcattggcaaccttgtattcatgtttccaaagttaatgtatgtttaaaaaacctgctatctttggatgaagataaacttcaaagtactgagtataagcagagttgcattatctaatacagaagtagctatgtcaatttaaattataattaaagctcaagaaaaattaaaaagtattttctcagttacagtagccacatttcaaatacaaagtaggatttcagtgagaatttcaaaacatggagtcatggtttcacttgaacatgatcgactcagttgtacctggagtgttgtgttttatccacactaagtatgacctgaaggatgaatggccttagagcgattgagtgacctctttaagctgaaagaaagggcagaaagggagttggaaatctattttactatttccagatgcctgaagaagaggcaaatttagagataaaactgaggctaggggcaagttttggaaaagtagattttaagttatcagtattaaggctcatttcctctactagagaaagcttattaataagttgtcatgacttttttagagaatgacaactggctagattgctacagaggggagtcagctatcagatatgctaatagtttttgtcctgtaccataccaaaccaggcagcatttggaaatcagtgtgcagagtattgtttggttaacaaaacctggtttctgggtcttgtaatctttaaaggttttttgtagcactgcattatggtaaatgagtggtgtttttattacatgtggctaatgattcctattgggaagggtatttagtccaagttctgatctaagtatctttcacttggaatattgcatggttttgtaactgttctcacttcagtctggttcactccttactaactgccttcagctgcttaaaacattctaataatgtctcacttctaccaggataaaagtacagatgtttttcaagtaatgaaaagccctgtactgtgggcattttccattttcttcccagattttatttctaccaataggttcttatattgaataatagaaaatgtctctgctatacatctgtgtctccatgcatttgcctttgttgtgaatgccttaccactttcaaggcattttgcctatcccagaggccatacaaaatcttatcctacctgttccctcagcagggttctgcagctcaaactcctccagtcacacatagctggctcactttcttccttgagggagacttcacagacctttgacaagctcatcctttgcctgatttttttttttttccttctctcattcttcatccacagaagtcctcccagtctccgctgtcatgtcagcttccttagggactcttcccctattacttagattagattaagatatttccttgataaatgattgcataacatcctctaattttctctcggaaattattcccctgtagtaattatagagcttttgagtattaattccccatctttcttcatagagtttttaaaatttagatttatcggtttttccatctatgaaacacacacatatacacagagacatacatacacgcatatatgtatcacatgcatacattgctcatggagaccagaagagggtattggatcccctggaactgaagttagatgtgattgtgagctaccatataggttctgggaatcatctctcctagttcctctgcaagaacgaaaggtgctcttaacttttgtgctatctctccagccccttttcatagaaattaaactgtgagaccaagagatgtgttctattatgtcataattccaacctcagtgcctttggcttattaggtactgaacacattcaaatgaatgaatggaaaactaagactttcctgattccctgctaaaactgcttatattttacacccttcatttcctggtactcagactgtgcattgtatatgaaatggacattactactttgtgtctctacaactagggatgttgttcattgtaagaatcctgatcatctttgcttttgtgccagaaaatttcctcccaacatgtggagaaacttaaaaaatgttaagtctaacggttttgtttttgattttttttttcctgtggtatcacatgtcttgtctgcctcaaaatattgcagtgacagacattgacgttgttaccctttctgaaaaacatactggttcataaaggtctgttcatcagtaagctttattgggcctacatggcttttatcatttttgtttcatagaagaaaaattcaatacttttctggatcaaatattaaaaataattttataacaatgaaaataatagaaaagtaatttactgtacagattttttgcccccccaacaacacctgtattccttaaatcacagtatttttataaattaatcatattaaggtataatgtatatgccataaatttatctgtaattcaaagatttttaacaattctgtaaacatataattatttctacatcatagtttatttttaaaaattaagcaatgagccaggtggcgtatgcctttagtcccagtactcgggaggcataggcaggtggaactttgtaagttcgaggccagcctggtttgcaaagtaagttccaggacaggctccaaagctacacagagagacctgtcttaaaaagccgcccccccaaaaaaaaattaatgtaagtttcaacattttaaggaataagtaattagatatatttttgtttcctttaaatccctgtcatcgctttggcttgttaatatttcttcgatgacatttgtttagtagtgttgaaacataagaaggaactctgttcccttctacctactggctggggctaaagtgcctttttcaccacttgaggtgtggtgtcaaaaggacaagctggaagtgggactggaaaaaaatgagaatggagtgagagtaaatgacatatggaaaggggaagaaaatgaagagatgacagacatagtggaaaagccatcagcattctacaaaaatgtgaagcacttcgaattttctgagtcagggagtttattctataataaaaaaaagtatgatgggccagctctggggagtagcgtgggcttcttcctcaagaattcccttttcagttgtgatctttttgccttgtctttctgtctgagttttaatattcacactacctgatgggtgcatccagtctctggggtgattgatgtgtttcccatgttgtggagagggtaatagagtattactggtgctttcagagatcacaggagaggtggcattgtttgccttgggaagtgtatattcaaaagtccttaaacagcggatgattcatgggtgtgagcagaagtagggaagttgaattccaaactgctgcaggtagtccagaaactatattagctcttagccattgctgtcaaatcttacaagccaagccacgacttccatttttatgttagattcctagtaagttactggcagatctgatggcaaatcagtgaattgagttgaattttctcaaaaaaaaaaaaaaattgcacttgattttgatgctatggagccttgctacctaagccatctttgtcttagcagttgagatagattttatgaaataacataaacatagtgtgtacagtcttcacactaaagaggccttctgtagataggtttcatatctctgttccatgtaattgtgttttgaatacttaatactaaatgtaaaggagctatttcagtagatggagacatgccatggtaagagcttgtacagtttgctaagtgaatgaatgcatgagtagactgaatgctatgtgttgtggatgagtgcataggctagcctttgtttcactgttgaaagtcacaagtaaaagtagaaagtttataacaatatctgcagataatcatgcatggagggagctggagatgaggttcagtggttagaagtggtttctagcactcatgtggagaagctcacaactacctgtaactccagctgtaggtggatccaacacctctggactcctggtgcaaacactcagaggcagacataccaatatgtacacattttaaaaggaaatggagtattaaatctcagaggacactttgaaagaggacggctgcttttggctacacagaaagtatcataaatttaaaatgagcttttaacttggcacatagtaagtgctcagtaaacatggcatatggtcagactacctttaagatcaactgaagttattattacagactcttactctctattccttctaggtttgtgttttttattgtatttaaaagaactacatgaagtacttcagcttcatctgcatatatttttgtttaagcattcaacccttcatgacagaaatacaaacatagacacttttacacttccaggagagatagaacatggaattagaataacctttcactgtttatgttaataaacgccagagaagaatctaaaaataagtacttgtagggaatacttaaagaattttttttttcttttcctgtaggtagcatagagaaacagatgggataagttgagctttgttttcagtactagcagaagatgtttggttagagtgctctcttggcctgagaatgaaatatgagcagatagtgcagatgtagggagcatcctctatgagcagagatatgtgtacagccgatgcctggttattccttagcactgtggactcagtgaccatggacttgtcatgtagtcatctaccacctggggatttcatttggaaatttggagactcccaaatgctattttgcatgtaaagttagagaaaagctgttctgactgagtagaaaacaaataattgtattctgtttctgatcttcatttatagcaccagcaacaagtggtgcaggctgtggaacgggccaagcaggtgaccatggcagaactgaacgccatcattggggtacgtggcctttccattttagctctgatcttagtgtttgtccttagcttccttgtttttttctttttaaattttgttccaccaaaggggcagaaagtaatagatgattacagtgaattgagcccttgcccttcagtctcctgaggcatttgttagctactcagaagctttctttgtaccacagtttactaattaacttggctcccaaaaactcccctgaggagactggacagctctttctcatgtttctttattgtgccatcagtttctgttgcttaactagacaggaacaaaagacacagatttctctgatgttaaaatgacctgatttctttttatctttccacaaatgatttagattgtcttaatatcacttttagtaaagtatgtattttgcatatctgctcctattctttctctttgttatgagtggttcttacaggatagtgtccatttgtagagaacagatgaagtgaaaaatcagtggcctagttagaaaatgttagctggcagtagtgacagtggtctttcctagaacctgctggatccataggtttgggcattcaccccagctccaaatgtaacagctaataaaacttagaaataataaaggagagaactcttggttataaactgttcagtattgacttaccagtttatgcagaagtacaagaaacactttgccacattccaaaaaagattccactccttctttctgctccctcccaaatgctttctttgtgtataaattatacacaaaagtcttttctctttttttcctctcagtgtatcaaacacactttgaaatgctaattattccatttactttcattaaaattcaaattgctgagtgaagatatgaataagggtcgtctgataatcaatctgaagtgaagatactgcttcaattatgccactgtcttttaacaaggaaatcaggacttggggatcactgcactggtgttggtagcagtagtctgattgtagcttgttctttaatgggctatttgaaggtctgttttgtgtctctctgaccaccagggggaaaaaaaaaaggcagtaaattagcagtcgtgagtggaaaagagtaagaaaaatgtcccttggaaaggaaaggctgaatcagaaaggttcccaggaggaaccttggtcacacattactgggttggggagatggggacagtggagagaaaacattttatgactagtttttctttcttaaaacttataaaaattaagagagctcagttttaaaagtttagtctatgtgtacttagcagttatgcttgtgtgaatttttttcatgtgagtgagttatggtcatgttaggatagaatgtatgtggggcttttttgttttgtgtctctcacaggtcagtcatgatggaacctacctacagttgttattctatgtagtttagtgtttatgatgcctttgtgtagtgtgctaccttattggaaaatttgcagggttatttcatgcatggctaaaagataggcagcaattcctacctacatttgattagcacctatttctaggaaaacagtgcatttttgtttgtttttctagtttctagtgatcagttgaacagtggaaaaattaaactaaatcagacctatgttgctttggatgttacttaaaagtgataataggtagaaaatcaaataagttttcctacttttattacttcacatatattttaatgtgctgttttacattatttcgtttttttttcacatactttgtcttgaatgagataacactttgtcctttgtcagagaatccatttgtaagttgtaactattactaataggcatattgtccatatagatttcattattaaaatgaagccagattaattttgtaatctaaaagtttacttgaaaaaaccgattcagtagagctgcatgctatcaaagtagtgtgtgttgatgttggtggatcttgtggagtttaaaactatttgtatttggaaagagaatgaagtaaaatcatataacctgcctgttctgaaaaacagattttacagaatagaaaggtaaatgctgccatgtgggtaaccacaaactgggaaagaaggaacctgattacaaactcagttgatgaattctgctgctgaggttcattttggttttttaaagcatgacgatagtcttatgtcagttttcagaaaatttatatatgattgtgggatcttaaatgcacccattgatctctgtcctcttggacattgtaaggataaatatttctgccaatctgcctgagcccggccgccatgtgggcgcccaaaataacacacagagactcccctattggtcaacaccaataagataaacatacacagaagcacttcccccatcatcacatcgttctaagaagtggtagcatatattttttaaacaagtttttatttgtatgttgggggtggtggcacacttgtgccatgacatgcattgtggaggctagaaggcaacttgtaggagtcagttccctcctaccatgtggaacctcgggattcacctcagtttgaagccttggtaacaaaaacctttatctgctgagctgccttatctttccaggaaatgataacacttttatttgctaccagaataatggttcaggtttagatttttcttacttagattttagaatggaattggcagttattttttgcatcgggggaatgacagcatttcgtctaggaggcacaagacccatctactctactgcagaccttcacttatttatccctatatatatgcatctattttatatgtaggcacagcattcagacaagagggaatgttcccagatttaatgaaatctgatgaagcaccttttaactctgcaatattattctaccttcattggtaaatgagccaaaccagtgatccatgcagtttaaatgcaaaatgctgtagtgagcctgaaacctggagaggtgactgttctcctgacaataagctagttgtgtttaatggaatgaaacacagttataatgatttctttcacaggtcatgttcagtttaaaagtgttgatggactgaaataacttaaatatcatttttgtcttttatttataagaaagaaaaccagaaagtttcctttttattatacttttgtttacagttactgtcttttattttgatttcatgtttctttgaagctttccttgagttcccagattggctggggggaatgttatgcatatagttgatactgtcatgtgtcctactagccactgtgcttttaaattagaatctgtgagattgcactgttggaacaacacacaaattgcagttttaaatcagtaatatgatctaattagaaatgatgttttcatttcctgtattattaaattgagtcatctgactatcttaaaatgcttcttaaatccattacactatataatcagtgcatgctgtgtgaatgtggttatgcttaataaaggaggctaacagactcataagaattttagcaaactactattaagaaaaagtttgttagggtaagcattggaaaaaaaaagattcagcttatgaaaatgaaaatgtagtttttaaaaagaatccctcaccctcttttctgttctaacttttaagggggaaatgatatgaatgtaagcattgaaataccccatcccaataacctttatgaacaggtatgccttagtgtttctggcaaatgcagtttagcactagaaacgctgaacctcaatttttagtagtgacattttaatgataggaagtctgcaaaattatttgccatcaattgtgaaggcaataacaagccttggtggtttttcacactttctgtgttaagtgctttcagaatgacagcgtaaactgtgttagagaactccaaggaaggaaaactgattaaaatgttcatgcttgaatggtgctgatggaatagttcatttggactttctctacctcctgcagctcaagctgaaatattaaaattcagtggatttaaatctctctcctctcagcacaggaaaaaaacattacattttaataggttttaaacccataattcattggtttggagcagcactattaaatctatttaaatattacttgtattactaaggaaattatttaaatgtctttgccttttactatcctatgtatttgaattattttttaaaaaagacaatatttactgttggtattttcttccttaacattttgttttattgtccttatcatttgattggccattattgagatataaatgtgtgtgcttacttttctactgacccttacaatccctctttctctccctctccctctctgtcagtctctctctctctctctctctctctctctctctctctctctctctctctctgtgtgtgtgtgtgtgtgtgtgtgtgtgtgtgtgtgcatggatatgaatatacattatttattgcagactgacatttgacattgtgggagaagagtcttaacatatgacaggttagaaagtatgtcccacctttactataaatggtgtagggcatgttaaacaagtacgtgcacctcagagcaggaacttgtcttgccaagcagggggtgggggggtggggaggctgagtttggcttctagcacgacccacattgggtagctaacaactacctattactacagctagggtgatctcatgcctctggccttcaaaggtacctatactcacatgcacccctccacacatacaaatttaaaaatgaaaatacatcttgcaaaaatatgtaattcttccaaaagaattgtataatgtatacccctgtggctacataatcactagtaagataaaccttgaaatgaaagggaaaacagtttacctttttaacaaaagccaaaacatttttcattcaagagcagttttccatttcttgatgttcaataacaggccatcaaaggtcttgttgatttgttctgctattaccctatattgagcatggctaacccacactattgaaactccttcctgggcccatctcattcccttaacatttttctagatgttactgctaaaacatgtgccgtgacttgagggtgcaagactaggaagacttgctttcctctggtgctttgttaaaggcatcccagtaggctagcattcagctgtccaccataatcatagaattaagaataccactcttttctccattccctttccctacacaccagtatctgattagcatggtttaaagggtacaacagccatgtgctagcccttattttattagaatctctactacccgcaggattttgattcataggcatcagtttgtgaagggtctttatcatgtagggaggttattgaggtcacatgttacaattgtggcttctttcccaatgtcaggactatgtgtaaaccatttacaagttcagtgtttacagcttgttactttaaaaatctaagctaaccttttaccattgttgctttcttattttgtatgatgctaaattaactttaaaatgagttgtaaagtagatttttgttttctcaggggtccctatttcaacctggttactgttttcattgaatagtatgcttggagcttaaaggctttgaagactaagaattgtttatatttgtaacccatctcatcaaagacatttcagtacatttctggatacatagacataaagcatttgctgataataaatcataaagaaatttattataaaatagttctttggatgtatattatatgtgtatatagttttgccaactagtaagatgaaagcaaattagcatactgaaataaatgtttatttttacataaagaattattagctgaatatttgataatataaaattaaggcagttcagagttttcagaattgatcagtattctgattttatattcctcagtgctcacagcctcacttcacataaatactagaaaaaatgagcagcatatggggactttcagaaactggtgtgaagtctgtcctatttccaagtcagagttcactttatttgtgaactcaagtcagcaattctaacagctaattttaaaatcaagcattttaatataatgtaatccaaagatattttctataaagaataataggaaaatataggtgcttgatgtgtttaaaacccgaggcttactgcagttccatgccaccatttgggtgagcactgccagaagcacctcgggttcacaatgcattttaatttttggttattgcatttagaaatgtttgctgttgtcattttttacttggtctccatccatagtttaagaagcttggttatgagttatgctatgggaaaggccactgtgcagttaaccctgtgcattttgtacttatagggctctgtttatgtgtgctcatggagctgtgatgatgcttaaaaccaaagcagttttgcatcaagtccctctttatgttgattccctgctccctttttcccttggccaacagagctgcagtattgagtgatgtagtcataattcaatctttgtgctgcagtttgctgggactcttaagaggctgtgatttcccttctctcataacaaagactctcatacatttaaataattttcagctcaattttcacttcaaaggtcacaaaatttctaggttagaggtatgatttctgatttgttacttgtgtgtattcaattaattcctattagaaagctcttctggaatgaatttctagaagccagccaattcatctcctctcccaaactgttgctaacctgaagtacttgtgcatccttctatttaaggaggagttttctccccccccccctgcatcagtaactagctcactttgaagtgaacacagtgttgctagagttgtgtgatgtgtctagatggggtaactgatgaaactcaaggctgcctgggattccactgggagaaacgctaccagatttgctaacgtgagtttggcaagctgtggctggactagcttcactattacacagagaaggcaggtttgctcaaattgacttggaagttggcagttcagaatttttatctctttattatgtttttttctaaagacttctcagtggcatttctccatgcagcatcaatagctgccattcagaggccttatttcttgtgggctcagcctagttttttttattcctcaaaaagttgagaaggcagaacaaacatgggctctaagggagacgaacctgaaacaggaaactaaaatgctactataattgtgtatgactcttaggacttaggggaagttgtgaggacttttgaagtatatattcaggatccttttacctgaaagtgtatgtgtggtcatcagtgctgccttaaagacctttgtgaaaagagtctcttcagtgaatagtaagaataagtcagttgccacatattcctgtttattattaattcagcaattgttctggtaccttcacatcaccttgttcagtattttcattttgaatattttaaaatctttcttgatgtgctttgaagtgaatcttcagattacacttaccttatttaggttttggtagttgtaagttttctgggttttatattttactgcagaagtctatgttagcatattttaaatttttttaagatttttttaaattttatggctttttattttatgaatatgaagcattttgcctgcttatatgtctgttgtaccacatctgtatctggtgcccaccaaggttagaagagagcatcatatccccttgagttacagttatgaatgatagtgaggcactatgcaggttctgggaattgaacctgtgtcctctgcaagattaacaagttcacttaaccagtaaccagttctccaaccccacatattttaatttccataaatttgtttggtaggctgttagaagacaaaagggagactgtaaacatcaatgagtatagatgaactttctgtcctgtagctggttcagtcccaaatacacacagaatgtttggcctattgctcagtcatattactaacaaactcttacaacttaaattagtccataattcttaactatgtttagccacatggcttggtaccttttctcagtaaggcatcctcatcttgcttcctctacatctggctggcaactacatctctgcctttcctgtttcaagaattctcttagtctggtagccctacctatctgcttggctactggccaatcagagttttattaaaccaattaagtgacaaagtaaacaagagcattatcccacatcaaatgagaattaagaatactcgtgttctttttatgtttgtaaatagttttagatacctagagttaagagttcagaaatatacatgcttattactgatgtttgatattagtcctatttagtgcaagctactaccacagtaaaagagcaagttccccatctttttcttttttcaaagacagtttctttctctattgcacacacccccccacccccaataaatttgtaggaacaagttctccatcctttttttatttttaaagacagttgtttgtttgtttttctctgtgtagccctctggaataaagttgttttctctcaaagtgagcttgttggagaatgtactgtaagtggagttgttatatggccttttgaaagcctcttccttaaacataagacctttgagacttggccatgtagttgcccttgtcagtagctaggtcccatgtagtgcttaatgatattccattgttagtgtagacccgtctgcctattcattcacttctccaaggacagagggattatcttcagttttgagtgattgagaatagtaatacaagaaatactcagatctgcatttttgaagttggatttcaaaatttcttgtgggtgattacctaacagtgagaatgctgagtaaatgatatgctgagtgtgtttcattttataagtgctatactgtttttcacagcaaccctgctgttctgcagtcttgctaaagggcctagagagcctcgctcttcatcccaccaacacttgggatcaccgctttttcagttgatagtattcactatgcttttccattttgttttgcataaaaattaatggtgttgtatttttatgtaacttgttatctctatatgcttgatcatcttttaatattctagatacaagcattctatgtatttgtcatatatattcactgacttttgtagctcttcccattttaactgtcttttgaagaggacacactattgtttttgtttttttgtttgtttgtttgtttttgtttttgtttttttggaatgaattccggactagccttaaatgtgcatcctcttatatcagctttctgagtgttgagatgacagtcatgagctactatgccttagagcacagcacactttttctttaaacatcaaggtaattccagtttgagaattgttttttcttatgtggattttacattatttttgtctctaagtaacatgtacacaactccacagcacaaatagtttttcctactttgagaagttttcagtttaggctcttgatcctatttatttttggtatgattgtaggttttattttgcttgctgaatatacaaatcttttgttaaaaatgttgtctatcgtgattcctaactttcctgccttcagtcagtcagtgtgtcttcagtttgctcctggtccaagacactttctcagctggttctttacagctgcttcctgatatgatttttttctttttttgaacttgtgttgttttttcatttgcaatctgaggtttcagtggtctttgtctaaaacatcagatctcatttctctcttgttcttaatcttctcatttatctttttgcttggtaaaataatgtgaatttctcacatggcctacagacttcacatagccccaggcttcatctaactgatgttgaacatgttcttgattagggttgtgtattgcctctttgtcatccacagtgccagtttccttgtcctgatgatgcttagtgcttttcttcaaaccttcattcagatggtctgcctcaggaagggacttccttgctgtcagcagcccccctcttttaatgggtgtgtcatcccctctattctctgagccattagcctctcttattttcatagcacttagcattgatttgtgtgtcactttcacttcttgtttactttctagccaaggtgccaaaacattgagaagttcattgttcaataaatgtttacaagataaagaataagcactgtttttcaaaagtatataaaagctcataatactgcttagtaaatgtataaacaaatgctatagtttgaactgttatttgtgggttttgtttttttttttctgtagtagagaggaaatgtagtctaatagaaaatatacaaatcccagtgtcatatgacctaagtaatgtaatttaggttttctcttctatacagttcaaggctggagttgatagccactaatttttctaatttaactttatggtcctgtttttttatcattttttatttgaattagaaacaagattgatttacatgacaatcccagttcccttctccctcccgtcctcccctaccaccccccccaactaaaaccctacctatcacttaccctttcttctattcttcacctgactcaaactttctgctccctcatgacctctgcatccctcttcttcttcccttctcattctcatagctccctccccgaccctttccccttctccaggggacaatgtttgtctcttttagggttctccttgtttactagtttctctggcagtgtggattgtaggtatagtcctatttttatgattatgaaattttcattttaaaatttagggtccttttatgttagtaatttatctagatttatcgtgtttctaggcttattctttacctcaaaaaacagtgactataaaaagtacatatttactagctattttctttgtttcagatactatgctaagcatttatatgtgttttgtttaatttttacatcaatcctatatagaaataatgtcattaactttacaataatgaaccacaacttagaatagagaagtaacatctataaggaggaagtggcagagataagatctctacttcttctgagtttgtcagaatgctctcatcattaactatcttcccttctttattgtctttaggttcaaatacactattagaattgttcagggctcagttgggaggaaagcggaattagcatgcttactgcttagcctgaattaactgatttgtatcactttcatagattggttgcattgtcatgactcataccgtgtttcttcttatttgctgatgttactcttacacataagaatcaaagttgtaataaatatgagaagataaatgtttcttgtctttagaaacaaagtctcataatgcaacaaaaaccaaacatgaaatagtaaaatattttggtatatatgcatacagaatgtatgtctctagaagttgaaggggacattgcataattgttattcaaaacttgttcatcagaagtttgcaatgaatttgttgctaaatcttgttcagggatttagaagcagaagagattaatgactactgatagctaattgtagtcagttggcaatggctgagggaggggaggacaagaggccagtcagggagagatcgagttagagctcacattttaatgccttgtgttttgaatagtccttccttgaagttttgtccttgtttcattgtaaacttaattcttttttctgtgctccatttctttgtctttttttttttttttggtttttcgtgacagggtttctctttgtagctttggagcctatcctggcactcgctctagagaccaggctggcctggaactcacagagatctgcctgcctctgcctccggagtgctgggattaaaggcttccgccaccaatgtcttatgtctatatattgcttatgagtgagtagcaaatactctgagataggtcagcaatattttttaaatttgtgtattactctaataggagttagagttacctgtccaccctcttaaaagttaagatgaatcattcttgaaaacttaaaagtttgttgtgtcttttactgttttttttcttagtggagtcataaaatgggagaaactatcttctctcagatttgtgttctgaagcaaggcagttccactaaggtgccaaagcaatgtggtagtcatatcatcttttttctttctttttaaaaaatttccccagggtttttctgagtttactcaaaacaatttgtagatacagctctgtacaaatttcatacctgggagaagaaaccattgagggtaaacagaacagacaccctaccagcttaagttacttgtcacttagattgaaaactgggaagttgttttgagatttcttaacagcttgctagaatgatcaagagcaaagataaatgatgggtctcccttgtagatgggtttcaacgtgtacaatgaaggctgactagatctagatgccttgtcagtcttcattacagataggtaggcacatgacttattcaagttactgagaaagaaagaagtgtgttttcttctttaataaaagatgttctttttctctccaatgaagaaaatgtcttcttgttatatgagaaatagtaatactatttaggcctcttttattgtttattctgtaacttgtaacttaactggtatgggtatgcatttacattttaatgtcatgtgactaaatataaaatagtagaaacagcctgaacacctagtaactagagatcacttaagagaacactaccaatattaggtaatggcaaagcacctagaaattaccaactaagcagcatcacttagagatacattctacaatgttcttgataaatactgcagagaaaaagaacagacaccagactgaactaaaagatagctggatgttgttttcatttaaaaatgcttacatatgtattgaaaatatgcacagtccaccaccgatattagtgttttctttggctagtagaatcattcttgacttttaatttcttgttattatttatctcttcatttcaatacaacatttctaattgaaaaacaaaaaggcaaaattctattctttttctcttctggcctatgtaaatggttcaatctgcctggttatgtgagatccaattttacatgttcctgagttcccttaagttattcttaaccatgtctttttttggcccactgccacagctcttatccaagcatcactctgttttggtttgagctactgaattctttctagctatttcctgctgttcatccttgttgctttcatttattcgctgcatggatttctgaatgtcaaaaaaaattaaatacttttgtattctatgtttaaataggcttttatgcctatatttatgcaaggtttatttttcagccaaaattctagttggtttttaactagtatcagggccatgagcatctcttggtcatgtgtttcaaactcctacccccagtttctaggttctcatttttctgtaaggtgtcatttaaggaacaaaatgctttttattttactgagtaagaaatactaccactccttttctcatactttgagcttcctgtaacccattttaagaaatcttactctaagatttaaagtagtactcagacataggggctagcgagatgggataatggttaagagcacttgttgctcttagagaggaccccaattcaagtctcagtgcctacatcatgggtcacaacattctgtaacttcaatttccagggaatccttcgctctcttctggcctctatttgcttatgatatacttgtgtacatgcagcctaatacacataaataaaaatacatctttttaaagtgctcagtcatagatctacttctgtgtcaaaaagagtaaacagattgaagaaacaacagtggatgctagcagcttggtttaatctgtagcttctgccaaggtgcttgttaaattcaaaacctttatatggtaggtagggcatagctttgtcccctgtgccccacagttgagggaatttgaattagtagtgaagcaaccaccagatgctcatgaggaaatgtgccaggtgatgatttgtcacgtgtgctttcattcctgtgtgcacatgcacacatgtacttcctcaggtattgaccatcaggaaagtgagacagtcatggtatttcactattaatacttaagcatgtatgctttgcagacaaaggtgtcttctggtgttggatcactgcagctaacatgtccaatatgagagttatcatcgtatttgtccaactgtccatgtgttttagaacttttgttagcacttttttctttgtagtgtttttctccaattcatggttcatatataaccagcttttcgtatctcttcattcttcttgactctgaaatagtccccacaccacattgctgtatattttgtttacattttaaagattctgtaccagccttgtggaaacttccatattctggatttgtttggttgttttctttttttttcccccaagattagagtcaggttaaggcttttgttttgtagtgggaatactataaaagtgatgttatatatttctaattatcatattatgggcaagctaagtaatctatggagtgattcttgacaccaaataacctgtttcctaacaactttgtacccatgattttattatatgctctgaattaattgagaatgaagaagtaatttccttttaaattaatattctttgaaaaagagcctcccttctgtggtggtcttatcatagcagtataaaagtaactgatacactatccctcctttgtgtgtacgttttgagtgaaggtagatacccttttccagtaacaatatcagatgtattataatacagccactttgggaggtagatgttatgactgtccccctgtcacacaagaaacaggcttagaaacatcaagtgactgtttctgttcatagatggtgaggattgcagttgactggctcaggtgacactccattttaatgcttcttgaatatctgtccaggacctcctttcttaagttccacccaaccctaaagatgggagatgttaacagtaatttctgtgttaaaacagtttttttttttttttctacaagccagatagtacttacattacttctgttctaagtctgctgcttttcatagcacgatgcctcttctggctccttaaggtctactttagtctgtctttctttcttggtatagtttcttccagcagaatttgaacatgttctgtgactgtctgggagaaggatgcctgcttgtgtgcttcagagccattgggctctgggtttgagaggctgggagccattctctagtcattgacactagaatgtctgtatttccacttgttttctcagcttaccaaggaaagacttgtgagtattaaaaaaacaaaacaacaaaatgtgtcataatcctttatagctgtctcattatccttctgatattatttgtcctgatagatttctttctttctagcaaaggcttgttttgttttgtttttagaaccaagatgacaaggggtaaaaggtaaagaaatcaaaatatggccactaagtatacttattgatgtaaggattctgttgtttctaatcaagatgcatggtgttagagatatggtaggcatgaagggtggagacatgaacaagaaagcctgccaggctaggttggggatgaatagaattccatggcagctgttctacccttgtcagccttggctttgtctagtcaggccctggtgttcaagttttgggaacatttgattaaaagaaatttctctttttttactagcatgcagacaacatttcaaaagatatttcctataaaatcgatttctacccttctttccaaacttgaaattataaagaaataattatttgttaaggaatggctagtaaaatgtaatgaacagaattaatgttttgtctgctaccttgattctaggtatttttagtcataattactggttgttttcagaattaaattatctggatggagtatttacttgcctgagtttaaactttgctgcattttagtgtttatttccttgaataacctgttagaaaggaagcagaagtaatttatgttttattgttgagatgatttactttttaaatttcacccctgtccttactcatagtctgtcccattggccccttttatcccctctacgtcccagcaaatcccccccttttcatgtcctttttttgttcttattatattttagtgaaataaggcatacaaacaaagatacagcctgccaaaaaatatcagtgaaaagaatttttctaagatagttttttcttttgggtttatggtggaaaattgatttattgttaaattgatcctaaatttcatgtgctcctctttagctttttattttgattggggagtgggtgggttaattcttctgaagttaactttttttttaagttggtggtaatttatcttggattatttttaaaacaaatttattgagtattctgtatgtgcatttccttcctgcggtttttaaaagaggatttcatctattttatgggaggataaagtaggaacccttgcaggaaaatacttgcagtgagcagagagaagagaggggtgtgggtttagcatgccaatcataggtaatactctggactcaggatgctcaaggcagtcatgggtaatactcttcgatcctcagaaattctcttttccatggattctgctttgtttagaaggcataatacagattctttttaaaatttattcttgatgtcatttgatatttaatctattaaaattatttttaaatggaagtgttggagttaagttgttggcttaatgggttttatttaaagaagatggtgtctaatgctaactctagttctagatagttcctaaggtaagaacttggaaagaaacatacagtggctactaaagaaaaaaaaaggagcctgttatattgctgtaaacatcagtggtgaaaatcaactggaatgtttcggtatctgaaatattcaccttttggtgacatgttgaatagcattttttggttacatagcattttatatgtagttttatatttttaaaacacttaaatattacattgtggagaatactgtggtgtgttttattggttagacaatttataggaataagtgacttgtgacatgaacttatggtggcccttttcttcttcttctttttttttctcctttaaacctattcagaccatatgctattaaaccatagaaccataatttgttgttagcattcctgacatctctaaaggctttttaaataagtaaaaacttaatatctcttaaaatatgaataggatatcatggtttcatttctgcaacagagggtgcattggtgtgggggttgtttggataacagcaatgtgctgatgttaattttcttagtttggtaaattttgttaaactttatatatgatgttaacattagtggaaactaggcaagagtaaataggaattccatatatccactagtaacaataaaagctttaaacacacagtgatatgacatagttttaaggaaaatttggtggtagctctgtttaagacatttgaaatttatactaaaatttaaaagtccaacaataaaaaataagtcaatagttttcatgtggagaggtatcaagctttgttgtttttgttttgtttttgtttttcgagacagggtttctctgtaaagctttggagcctgtcctggaaagctcttgtagaccaggctggtcttgaactcacagagatccaactgcctctgcctcccaagtgatgggattaaagaagtgagccaccattgcccagccaagcttttaagtttcatcattatactatgaatcttgcttattttagattgtagctatttatttttaaatcatcacaaatgaaaaatataggaaaatcagctgacttttaaatttcttttgcctgtattttatatggtgaaatttcgttcattaggagaaaataaagccagaattaatctgcttataagaggtgctaaccttagttgataatctgtttgatacatactaagaataagaaatatctagtactttgagattttaaacaaaatagctctattcattaagttatagcaaatgttagcatatgcaactatatctagctatccttatacaaatcccttttattttcttgggttattgagtgttatttaaatgatttttgtcctcaagtgcattcagaattcagatgcagtgctatagaactttgagtcagagtgattgagtgtaatcagggtgagatatcccttcacaaggacattagaatgggatgagaagaatttaaatatgcagaaacaaattattgcgtgcacatgtgtgttgatgactagtaataatagatgtagaggttcagcatactcgttcaattgattagttaggatctaaggtaaagtttcatggatgttgtacagaagtgtgtagtcaaactgatgctagctttctggaagatcttgaatgctaggaaatttgaactgtttttatttgggaagtataattgttttcaaaaccacagaatagctttcaaagaggctttttttttttttttctgtacttattggggtgactcttccttgaaggtgcacataaaggaacaaggggagataaggcccctgtttgagctagtctgagggagagtagaccaaattggggacccaagaagcatacagactgggatatattttctgcctggtcctggttgaatgggaaaataaggcagctaatacctttttttgttgttttgttttatcttttttattctctgagagagaagaacaaaacactggaatcactgaaggtattcttttaggctgagattttctttttatcatatataatgacataaatattattcagtgtatcagataatgtgtgaatgcttctatgtctgaaggtttgctgtcatagagactggaacagtcaaagaagtagttgcttgccaattgagctcagaaatataagcatccatacacctaaactgtacaataaaatattagtagaatttagaggaaaaagagaattggaacagtttgtcaataaattgaactagattttaatgtaaacttgacttgtatttacttaaattcctgaattcatagtgtatatataattttctacatgtttagaaaatattttgcatgcatatttttggtcacaactaagtagcattatataaagaattgtgaagatgatttggatcactaaaatgaggaaccatctaattttttgtatatgtttttaattgaaagagaattatgtaatcactttctcctattctttcagcctctcccagctaccttcccatgaactcctcccatatccttccactttcaagatgatagcctcttattattgttgttacacctatgtgtatacatatatatgaacacacaatttattgagtctacttttgttgttcatgtatatatgctttcaaggctgacaattctgcattgaacagccagtgagggattcatgctcctagtaaggaaacatctaatttaaaaactacagttaagaatagctcttagatacatggaatatgaggttatgttgatggagcatctgagtgctgctcctattttccatttcatgtgtatatatactctccttagttgtttcaggtttcaactttgcttgctttatgttaaatgagtgagccagcaggagaaaagagttgatagtctcatataggaaggcacataggaaaggatgaagaaagacaaagtaatttaaagagtaaaaaaaaaaaaatcacatttttctttgagatactttaaaaagccttcttaaagaataattttgccagctgttggtcccagcactagggaggcagaggcaggcagatctctgtgagttctagactaccctgtctaccaaagctagttccaggacagcctccaaagtcacagagaaaccctgtctcaaaaaaaaaaaaaaaagaataatttcattcttgaacactattttgtcaaattttgctaagaagaaaattatacaaggactggctattacagattttacctaaaaatggcttatttaaatcagtaattaacatttagtaactacatatgttagtctcaggattgcccagcgattgttctgatagaattttgttagctgggttgaagagcttgctgttgcgtggtgtatttaactcaacatcctctgtagtcttctcctcccctttcgaattcagcagaggcagcaaacctgcccatagtagctcctgtagacaggcttgattcagtctctgctgaggtcaagcactaccatcccaacctcttaagggctttctctatgtgttgccactgtgctggtaaaaatgactttaaactcttgtcagcgtagttactggtgcatgcatcacagtcccactcaaataaacctgtcacaacacaaagtcagctgctagagaagagtacaagggcaggcctgtagcttttcattcgagcatcactaaacgtgcacagagtgcccaattatttcagcattattgagcaagcctacaggagaacccaagccttgctacattggattttctttagtaatttgctcaagtgccactgaggacactcaaagggcttaaaaaactgtggctgcaaccagctttcctttctgggttgttaattcaggttttctctttcaaattaactctccctgcatgctgtgctgtggttctgggacaactgtttagcactaattttctcgatttttcagcttttcctgttcagcatgactgctttaacagttattcacatatacattttgactagaaatacatgatagctagacctttgttctagaacaaaataatagagattttgttaaagaacatttatcttttaaaagttacttagccagttttaccattttaaaaacttaggttgtttaccctacttttttttttttttttttaagattttagaagtatcacatcaattagatatcgcctccttcccctccctttcacctgattgtaaaaaccatgcatgatgagggtaactccttcagagcaatattatctatttgtacctcctgtttttcttgtggggtacaaaagggacaaattcaatatctatgtctaatttttcacagcagcaacaactccaagctcagcatttatcacatggacacggtctgcctgtgcctctgacaccacacccttcagggcttcagcccccagccattccacccattggtagcagtgcaggacttctggccctctccagtgcactaggaggtcaatctcacctcccaattaaggatgagaaaaagcaccatgataatgatcaccaaagaggtaagtgattatgtggatatcagtgtggcattatctagaattcagatgccactattgattctgtctctgattttttttttcagtgtcttaaaaatggacagggggtgttggtggcacacgcctttaatcccagcactcgggtggcagaggcaggtggatctctgtgagttcgaggccagcctggtctccagagtgagtgccaggataggctccaaagctacacagagaaatcctgtctcgaaaaaaaacaaaacaaaaaaaaaaaaaaaaaaaaaaaaggatttctaacagaaggcagattaattaatagaaatatcataccctagtgttgcccaaaaggcaaagaactatttccagattttgccacctcgatctttcttcttctacccaagctcttctggggatgcaaaccagggatgcaaaccttacctatgctaaatttctagctctccagatcatcacctttgcttctttacttcctaagtctaaatcagtaatgaaatcctgttttaaatgaaatgagcattgatagtcagctttgaccagattgtttgggaggaacttaaatttttaaagggttacttgatatttgaccaattcaattattatctgtaaattagatcgacctacaaagcatagtaagaaaacttccagttgtctaattgaaatgatgcaattgcattgccaaaatttgttttaaatacctctttagctcattcctgttcaaaagcataagattactgaatttctttcaaataataattgtcataattttaaaaagcagctcaagggagaaagatgccatgcaacagagttcaagtggagaggattttttaagtgaaaagtggagggagcagcaagaaagaggaaagcgtaggggtggggtgggagcaggcagagagatgggaggtgggcagggccttcttaaaagggagcagctgaaggtgagtcctgttagaactccaaaggcaggacagtaaaatgcctaaatactaacaataaccacttaggggttaagttgtattctctcatggttgacctttttctcctctaaggaaggtgagaggcattttaatattcctgtatgtttgttcactgcttacttgttgcagaatatttgtttacactgtgaagatgtatctttgccaaggctatactgattggtttaataaagagctcaatggtcagtagctaggcaggattttcagggcatcagggatgagggaaaaagaaggcagagatgccaggaaacagcaatcaagatgggcattacggagatgaggtaataaagacaggagacagaaagtaaattaatagaaatgggggtttaatttatgttataagagctagtagaaacaaacctaacctatctgctgaacttattattaatcattaaagttctgccattattagggagctggtggtcctggcaaaaaattcaactacacttactgataatttttaatagttaaccataaatattaaaaaatttttcttccaccattcctttatgataatttattaaacatagggatgctttatttgtttgaaagggtgcagcttgtaataaaaaaaaaaaggtcctatctactgctctttcaattttattaatagagttacaatcaggggcaaattaaccttattatataagcataaattcaccttctctgatgctagaaatactgtaatgtttgttttagagttatcttaatgccatgatacagagttgactcatgattataaactctaagtggaaaagtcaataaggtacataaataagaatggaatggctaactttggttcggttgaaatcgtgtcaaaggtgaaccagttctttgtgaatcttgttagaatagtattaataattaactttacagcaaagttgacatctgttcaatttattatttagcaggatcaggtttgataactatgattttatgtaaactaactaggacttttttttttttcttgccattctgtctgcttgtcttgctgctgttttgcctacagacagagactccatcaaggtaggactcaaaattcagacacaagaatatttttaagaaattctaagtgatgagaatatatctagaaatggattctttgagatttagagagtagtgtgaatagcatttaccaaattatggtaatcttatgtgtatagttaatttcctgaagattttaatctgttatagctgccttctgtgtgtcttttttttctttttaatatttattaattatgtatacagtgttctgtatgcatgtatccctgcaggccagaagagggcaccagatctcattacggatggttgtcagccatcatgtggttgctgggaattgaacttaggacctctggaagggcagctagtactcttaacctctgagccatctctccagcccctgtgtgtctttatatacaatttgtagagaaggacagcaagtatttagggcctcctagtttgtgtatacttgtcttatgtgatatcagaatgagataggctaaggacatttgaatttcatagtttgtaaataaaacataagctgttggaaatgaataaacttttaaagtgcttccatcaactttgggtcaggcagagtggaaatatgtcacgtgttatgtccaattgtgtagcacatgtcactatattacttacccattacaaggtaagccagttctgaaatactagcccagagtatggatattgtcactttgtctttttgaattttaaataattaaatgttgtgaccccagcattagttagaccctctccaagttttttgtttgtttgtttttgtgaactatatccaaaactacagtcatttccagacacagttccttgcttttactatgaatgctattttactcttttttaaattaaaattgttttcaggttctgtaaattcaatatcgggtatatccattttaccatttaagaatctttgaatttgaaagggtgcctacattcccaaacaactgccaactattagaaatatacacattaaattttaattatgtgtttgcagttgtgcagtttgttgtatactattcacaccagtatccaaatttaaaaaaaaacttaagagtgtaattacatgttctccacgtgtactttagaagtaataagtaaataaggtggttaggattggctgatatgagctgtaaggaagcctgtctgaggctataccataaacattccctgcctactcatgataaatatataccttcagacaggttagtgggcaaaacaaaagactcctctccagccccactcacagaacactgaaaatgtttatacaccactgtacactttatgccagttacattttacagtcccttatggaaagagtagggtatatttttaagccatctgtaatcattcagagtgagcctggaagtatcataatagccagaagccaggctattttattttatttaccatgaaaataaattgatggctttgctctgatttattatgaatggcagctattagtccatacctgaagtgtgctgtgtctggtctggtattgtcctgcaggtttacaaggtgaaatagtttgctaattttcttacatgtttcctgtgatgctcacagaagtagttgccaggtcattgagcatccttaccctcttgtaaggagttcctagttgaggggatttttgtgatttttggctgattatatgactggggtggtttgtagcagcctgtgatccacttgtctgctagttgggccagtatgaaataattcattcatgcacaataattctccctaacatttaacaggtaatgaatgtgacataaatttccttttggatttagaattttcccttctctcttctaatgtgcaaacaggcagctcttgaactctaaataataagtaatttttggccatctgtcaaaaggaaatttcaatacaagtttaaattaatggtgcctgaaaatttttatagcttctctaaaagcctgtaatgtgcaaaaaatcggaatctgctggtagcaattagtgttgcgtgtaatgaagatgtgggcagtattacacagcttcattgtaacattttgatattttaccaaaatattgatttatacaaagttgtggatgtgtttacttgtgagagactcctaaaaaatgttttcttgatgctacttattactaaacagggcagatttctgaacagcttatgaaacatttagactcactgtaaagattcaagtaattaaggtgcttgtccttgagaagccaagtaaagcagagaaatcacttactaaattgttagatctttccctccttttcctttctcctctccaaagttctgtcccactaaatcacatgctgttggctttattgatctagctttctgtagctccagtagccaagttcattcttaagcctattatttgcagacttccatctgaagttttttaacactgatagagaatgtaaatatggatctaaaggagaaagcactgtagggagtcctagaatcaatttacttggtgatgaaaaactaaaacattgtgtacagtagtactgttgaaataaggggccatagcacctgctaccttccttatttgtcttggctatctgctgactgtgtgtgaccaatagtaagctccacatgtgaggcctgaaaatggtaagaaattcacaccattaatgtactcttactctagtagtgcagacagttcctaagatccccaaactaaatccttacctcactgtcccatttcatttcttcccattcccttccatatgtcttacccataggaaaagaataagtaaaatctgggggatttggagtaaaaataattggttctagaatgtccaccacaggggacattgattgctccttgttgccaagagcctcccagttgctgaggtatcccagttgctccaagccattcaggtcttaatcactccagttttcatctgactgaaatgtggtcaatagcttagagcaacaaccaccaaactcctaaagttggtaggaacctaaggctgagaaattctttctaccattccctacatccagtgtctacataatcctaagaaaacaggcatcaaagtcaaggtcagctgcaacacataaacacacaattaccaaatgttaatcagctccatgatttcttccatatgctactattgagcatattttcattaacaccattttatttatgtaaaaaaatccttgtgatttatcttgaagatgacactcttctatcagacctgaaggatttgacattttttatgtgtacgatatagcagaagtgcaaacttttttctaagtggtaaagattttatttttgttattttgtcaaaataatattccaccaaataatgcatgtcttcatggaacattctcagttttacattgtccattatctccagagcctctgcatacatttgaaatgctgaatgcagtatttgcctgtattctaacaaagtaataagtacagatgttgcacttaattttaaagatttgcatatttttcacactaaatatcacattatgcattttatgctgtgagaattctttgcttttgtttaaaggcttttatggtgatcttctctttgttgtttgtaaagcaatgcctatttattctgtttaatctgtatgttagtgcttattctgcacagatgactaaaacatcatatgtttctgtttactttccagttagtcactgttggcagtaaaggtttatcactggaaaattagaataaggttgttttatgttcatactgaagagtgtgatttagggcaagagagcactgtagcctcattagctgggtattacaggtgagagtgggttagagtagagtgattacttctatttgccactcactttgcacatttagatttaatggccaaagttctgctctaagatctgtagccagcatatccccaccccctttaagcacacctacttttcctgtctcaaaggactatctgtttaaaaggcatgtgttttaaatgtgttccgccctttgcaatatcctatgtgtgagagaaagcactagaggaaatggcctggagaggggtaaccatgtgcctcaggtagttttgttctttatattactatagggatattaggcttttgtggtaagcatggtagtgccattatagtactatcgactttagaaagacatactgtttttcttaaaggcataaataaaaaaaatggaaaatgaaatttgagagggagggatagaaaacaccaataaaacactgtaaagaatagctaaagaaccagataagcaaaacagcagtagacttgtgttaagacagttttcccttagtagtaagtagtcagtaatccaaggaaagctatttgaataggaaatgtgatttggctctctggttccccttcagtcactctgtccacaaagttgtttccccagatctagaaaaaaaacttggtagtggaatccccagactccccagttaacttctttgatctctttaaagacacctctgtcttgcacatttagctagtttacaaaaattgtgctcatcctattgcaaacctgaggaaagacttggtgtggtaatatatcatttatgatttattaaaacttgcctaaggattcagaaagcaaagtcagccacaaactataaaagtcagacaatggtgttatacacatttaatcccagcagctatagagctaggaggtggtggcacacacctttaatcccaggatttgggattaagaggtagatagatctctgttagtttaaggccacactgagctacaagatatatatccagtcctaaagagaaacagctcactcaaagatgatctcggcacttgggatcacatcgaaggattcataagaggtatttaaggcaggaacaggtttcagagctggcattcattctccagccacgttgagcatagtctcaggattctctccagccacactgagaaaaggcagcagtctaaggcttagtgaagagcttgtcgatcagccctttcagactgagctagaggtaagagctagtggtgggttcctttgcttttctaatcttgaacttgaagctcgaaccccaatatctgtctctgggtcttttatttatcatgttatgaaggccctacccaaggtcaccagtgccatcctcaaaggaaggctctttaggtgatttaatcttatccctttgtgttaaaaattagaaagatactcaaaagtacaaagaatagcacaaagaaacctatccatgaaacttctatgtctctgtacataaggtatagcatttagcctttttttttttttttttttttttgtagttcttttcctttactgaagtatcttgaagcaaattatagataacatgcactccccccattacctcattggggtaaaggtatacatcgtctaaataatgattttaaaaaaaatttgttttgtttttatgagtatttgtgtgttgtgggttgggcatgcacatgacccctgtaagccagaagaggcatcagactccctgaggctagattatagatggttttgaaccacctggtgtggctctggaatggaactcttggtcagtgctcttaattgagccatctctactccatgaacataaccaaaaaggttttcgttgcttaaaaagtacctatttaatatttttattacatagctaataatccaacttctgtgaatattcacaaaacttattttcttgaaatgtgaaccaaataggagtcattattcctcgtttgttctgtaaacttttagccctgtcttcatctaaaagaatttcccttttatattttttcctaatgacactgtataatttttttctcttttagattgcttatttcatgtatacgtgtaactgactgaatttatgtgtgtgcaccacattttgtacctggtgcccacaacagccagaagagggcatcagatcctctgaaactggatttacaggcagttgtgaaccacctaatgtgggtgccgggaaccaaacccagaccctctaagaatagtaagcattcttaactgctgatcagtctcttcaggcccacaggtttagcccaggctgaccttgaactcatgatcctcctatcagcttatcctactgttgttcaccaccacagctagctgcatttgttgatgtagtgtgtacatgtgcatatgggttccatgatatgtgtgtggagaccagaggttaatttttaggtgtctgttttctcccatgtggttcccaggaattaaattctggtgagcatcaggcttagtgacaagtgccttcacatggtgatcaatccagctggacctaatttacttataatgcccttttaaaaccaagctttgattttttttttcccttcccattgcctcccagattagattctttttctcaataccctaaaaatagtggggggaaaactttgtagtattgtgggtagcatatattaagaatatactttaagaacctatgttaaccattacttcatttggatagtaggtttacatttccaacacatcattgtctatatgtaagagacaaatggaactcataatatttattgatgattagtattgtattccccccccaatagcacaaatttcgactcattttgttttgtgtcaaatttacttctttgttcaacatcaatatgtacatgcaaataatacacgttattcttgtgtccttctctcatcataagtaaaagagtcttcctgttatatttaaaaccacaaggaaatacttggaaacacctaaaatttgagctactttacaggaagcctaagcaaggttcttagagagacccttcttcagtggtaggtaagatgtgtgtcagtcagtgggcaatcacttagcctcctggatctcctctgtaactctaggtatcttaaccattggaatgttactcttttgggggtgcttggtatatggatgatttaatgtaatgctttctattttccaacatataatgacaatttgaaatattttagcattgttgttgctttttagttcctttataggcatttttatcatgtattttactgttaacagttaccttatcaaagaaccatcaggaacttttgttctattggtttatgatgcactaatttgtgcagtattaattgatctctgcctccaggcatgtaagctgtgtgaaatgtaacaggtgccctaatttcagaaaatgtgttgtaattgtttgtttgtggaacagatgaatgaatgtctttagggcacagctggtcctcaggtggtgagcatgagtggattaatgatgtgacgggggagtcacgcttgttttgctgcacttgcttccaccgattgctgaagcagaacaaatattaattaacagggtagtctgattgtcagatctgccttccctagctgattttgcaaaggtggtttaaattcttttcctgtttaaaccaacagttactagacattttcatcttgatgcttattatctctaattttcttaattagaatgcatttcatctcttgaaaaatattatacagtaaatttatatttaacatttaaaaatatttcaggggagcccaagattgaagtgttatacttagcactgaatttcagaagcatctgtttctcgaagtatacataattttttcaaaagaattattcctggggattgtttgccactttgtgtgtgtgtgtgtttttaaaatactcatccattttgggatggagggaacaaaaaaatcacccagaaggaaacttagtgcttgcctctctattgattttctgcagtatttacttctgcataatcttgcatattttggtgtatggtgtggtatgaaataattcaactatcttctggcttaggcaattttctacatatggagccaccgctaacaagcataagcattcataactttggacatgaagagtcaatcatagctgatactcatgtaatggcctgggataaagcagacgagaattagtagcctcatgaagaagtgaccagaagttgttgagggctaagtggtacttgtcaacaagttttgattcctttaaataagcttgctgttcatagaaataaaatcatctcagaattgatactgcttagtcagatactggaagtcaaactaagtttttcgtttttttttttttttttcaaaaaatttcatttattatgtgtacaacattctgcttccatgtatatctgcataccagaagagggccacagatctcatggatgattgtgagccaccatgtggttgctgggaattgaactcaggacctctggaagaacagccggtgctcttaatctctcagccatctctccagcccccaaactaagttttacaagtatttaatactccaaatattaaagaccgtccttcacattggtttaagtttgccaggtgattcatgcttcaaaattaacccatgtgtttcctacttctgaatttaataaggtatagtacctaaaaacccacttagtcaccagtgcttctgacttaagcaatgtctgtttgaatgttagctttcattggtgtcactaccactctgaggttggtggtgtgcctacgtttatgttgctagagaccggagctacctgtcttcctttccttcctcgaagtttaaatattacaccccctgtacagtcaacaaatgctcttgaaaaggttacatgttccttacctctgcttactgaactccaagtactgagatggatgtagtagaaattcttaagtattcttgtcagtgagactttcagtatgtggatagaattctttcacctggaagtagacacattctataattgcatcacttccctgagaattcttgaattttcttctttaaattggcagttttttgagcttctgatagtccagacttgaggggaagaagagctggttgggggaggagtaaatgatgtcacccttagaaaagtgccattggcactttagtaacacctcactttgtatttagtccttcttcgggtaattttaattattctggaaatttgtgaaaattctttttagcttaaaaaaaaaaacttctgttttcttgagtgacatttggccctttgaaaaacaaaatgaaattggaaatgctaatgttttgagccaactaaggaaggaaaataaaaatgtcaccatggtaacaaagctgctttctagatggtttcctaagatatgcctgaactagaagcagatgtctgatttgagaatcttgcctccttcaatgtaaacaaataacttctgggcaggtgttggaaataatatggaaatcctattaaggggccctgggttcctgtcagtcaggaagcctgtgccacaaaagggctggttgtcacataaaggaacagagtaaattctcattaggcttgagcttttcccaggaaatgattgtctccttgtgttttttctcctgtgaatctaaacgtaagctgttgcttctattgatctattcactggctttatttttctcctcttcattacaaatcttccctggccttgccagcccatattctccccttcacccaccacttccctttagattaacacttgatctgtgctactgccctgagagttgtgacattgtgattttaacctcctaatctgggtggaagagtggagacctgaagggaagtacagctttctccctgggcctgttttacaaagagccaggctaattggatggcctcagtgtttggggctgtttagaaccagcattgtgagcagcagccatgaacataaagagtgtccttatgtgcatatacttgaagttgtattttcataaattaaggagaaatttgaattatgaatagagaggatctaggtaaacctctgaagctacactgtccaatattctagtcacttgaagcttctttaaattaaatcagttaaaatgaaataaaaatataaaacccagtttcttagttgcacctgaagtgcccagtggccagggagacacagagcacgaatcattacaggaagctaccttgatgacagtgaagagactagcctgaggagggttattgcttctgctgtttcatctggctgaggcggattactgatatttaaaggcagggtctctctggatgtgtagaaaacaagggccatgctgggcctggtagttactagtaattctgtttactgaggaaacttaggaggttcacccatttaagagcaacccgagtaacttacactgtcacaaaataaaggtaaaaggagggctaggctggagctggagcttagtggtggagaatacttgcctaagtaggcctgaggccttagcagagaggagaaatagggaggtgggaagccaggcaggaaggtaggtaaaaaggcagatcagaagatgggcaaagggtatgtgtgtgttagctttggtggtcagtgttctgcacaaatatggtgatctccaaattggtataggattttattcatttaggtttttttttggtcatgagatctgatgatcagtttgaaggaggtcttcccaaagtggaactgtgaagatgcatttaaatgattctgtgtaaaaattttttggtggtgggaggggcagtgttagaggttatagggaagggtactctttataatacgtgtaaggttaaccatggataaacacaaaacaaggcttcagagaagccacgctattattatgcagcatttcttggactatagtcctggagatgcacttcataaagccaataaagctcgcactggtggtctcctgttgccctagcaaccgaccatggggcacagtgtatgtgaaatgcatgaacatctgcgaattaatctttcttggtttgttcttttcttggcactgattgagccacttgggcttgggcctgtgacactgagtgtgaagggtaatctggagctgtccccagggccttgccctgagtgggtggtggaatgaaaagtaaggggagatttatcccggtagtgcatgcaggagtagaggatttagtctgacagcactctcagtaggatgttattagcttactttcttgtggcatggggaaatgaataaaatttttgctagtaattatggacatcattgagtttattgggctgctctgaaaaaataatctgtagacaaaattgaaataatcacttgtatttataccatagttagcgtgacttacaaactctgaggtatgcatgtcttcttcttagcccttgccctatattggactgttagtgtctgaatgagccttctgaattgaatgggtaggctggaatttgatttgataataaaatttggtagtcacctagtatgaagaatttcaaaataggctagtgacatttttgctcttggaagaacaaactgtgactacatatataagcaggagaagcagtgcttttgtttagattctccatcaaacttcaggattgacttcttcagtctctgtcctttacaaactgccacccattttgctgacattggggcccagatgttcacttgtaaattattcttgtcactgtcagtccctttcactctttctttgctacctttgccctttttctttctccctggagcctttcctatgggtctcttctggggagaaatgaaagaatactatgtcgtgaaatactatcatggtggaggtagcttttttttttttttttaaagtaaaacatttagtaaatacatgaagacaagaatcttcacaacccatttgatttgcttagcattttaatttgaagggcatttcattagagagagaattaattctttcagctcaaatattttcctttataggttcttatttttggtagagaactgaccaaaagttactttaccaatggctgacctttgaaatctgttgctattcataggtaaacgttaaaacgtgcatataaaactagtttctgatgatgggagaagtgggtctgaaggcaagaatccactagcactagggcaaaggcttacagtgatggaaatggccctgacttgatgtgtgctttccactcaaattctgaaagctctttgtagaaattagcaaaacaagggaatatggagactttaaaaagacattattgcctggtttaccaatatttattcatgcttactttcaggtgatttctctaattattgtagcttcttctacttcatctaccattcagagagcatcttttctctttctctgtagtgagcagctttagttaataccatgaaactagcctgaaaagtagaagacttacaggaaccatgagataccattagaagaaagtagaaatctcaaaatattggcttttgtatcctggactgttgtttctttaagcaacaattctttatgccaagaactctagaggatttgtagtccctcgtggtaagtagtaaaatacaaagtattcagtggacctagagcctgtcagttgtgaacaaggtatcagtatagtgacaacaggaaattaatctccactgctttcttcatttaggtttgacaaagtatctaaagagtgtaaagtgctctgtaggtttaaggactggaaaaagaacaccactgtagaagagaattggttagcattcaaacatcctatctctgttgtttgtactagcttgacaaacaacattatttcttgatctttatttttaactgattgattgatattccagttctgggtattgaatgtagggccatgcatatgttaggcaagtgctccaccactaagctatatataatatagcaatgggtgcaaagttttatgaaatagtagttcagtgttttaagatggggcttctgataactcccaacattagcatgttgggtctgctcacttttgtgggtcagggtaaaaatctcaatagaagtctaatgcaacatttctaattatattagaattatatatctcattatcaagtatactattgtaatgatgtagatcacaaggcgttatcaaccctttggaattgtcactgttggaacctgatgggctctcctatagtttcttagagaaacctgagttcttcatagctttatttatacccttgatactgcctttagatctaggtgctctcaaaccagctgtttggaaggcctcaagaaggggactgggtcaatcctgaaagtgatacccaggttcatagtgtatagggtacagtctttgtgtacaaaggcttggggagacggtattttcttggtcctagcagaaggtgtttagttgacagagggccctgattcaagtcaggggcccctcgccagcttctttagtttctgttgtatttcacaaaccatatccttcagggggaaaaacgggggggggggtctaagaatttttgcatcttgaaatattgttttgctgagtaaacatcatttttatggaaacatggctggggaattctaagatacttttagaaaccagtactttttaaactacatttatagcttatttgcagactatactttaaaaatactcttttcaaacacagtagaagtgcttgcaatggggaggctgttgagtgaagctccctggggctctgcagtcacacacgcacgcacgcacgcacgcacgcacgcgcgcacacacacacacacacacacacacacacatgcacatgcacatatgcactcatgaacacacaccccctactccatagtaaagctcaggcagtggtgagaatgccaggcaaaagttggacctaaaaggatttagttatgaagccctgggcttcttagaacagagattactactcagaactaactgggttcatgatttttgtttcacctgcctttccttcctttgtactctgctttggttggctaactagaagtgccacaggaatatttgaagagccttgtttagtagtttacgtgggaagttgttgaattattcacatagcaaatgattagacaagcacttgtccatctgactgaattattctacatgtttgccgaagcagcaaagaaggtgaacagcatttcctcctccagagggtttacagtggcggtattgacccatctagttattgggtttcagccttttgttgacattgttgtaaatgaaagcagcccctgttgatctctgagcagctgggctggataattgtgaaggattcttgcttgttgctgttaccctggtgtttgcagtgggttgtttgctttgacttttgttgaactgttgacaaaagcattagatacaaatgggaacaaataaagtggtgagatgccagtagggcttggcaggagctatggttttcatcctgacttaataagggtggtagaacctatctagaagagaaacagaagtaaggtgtgtgtgtgtgaaacagaagagaaatagaagtaaggggtgggtgtgtgtgaaacagaagagaaacagaagtaaggggtgtgtgtgtgtgtgtgtgtgtgtgtgtgtgtgtgtgtgtttgcatgtgtgttcacatccattttttgtaaaggccagagaagcaaagaggccaacaataataccatagccctaaaaaagtcacatcatatttcaccatgcctatcaggtatgatgctgaccaggaatgatacagcagaaatagtttctggactccttgaacaattaaaaacatttattatttttttaataacgaagatattttggattggataataacaggtatgacatcatgatggggaattaggaaggacctgatcagaagcctaaatatagtcattttggcctatgaatggtagtatacacatttctctaagtgaagttcactcccagtattgactgacaagccagtgagtttgctttcaggacacagatggtcagtggaggtgggtcatcttctgagaaggaacctgctgacaggtttactcacaaatttgtgaaggttgtctaaaagcattgaccagcagaacttaaccacagtgcagtgaatggaaactcatagaatcttcttccctcatttggaataactaatgaagccaaaagcatgtttatgaaacaaatggcagctacattcatggaattaaaatgccctttagaacaatacacttctgtgacatgatgcttgttagattgactaaattatgttttagtgaaaaaaaaaaggctataatttgtgtttggtatgttttgggccagggtgctctagtcccatcagaccatttgttggtactactttagtcagttctagagcagggaggagcatgggacccctgttctgtgttctgttttcctgacttgggtattagattcccagccctctataagcaaagagaaatgtagcttatttcttttgtaattaggctttgtctaacctacttcatgggatcaaatcttcagaaataacagtaattataaagtattggctgactggacatttcaaggttattttcatgtttgcactttctgcagtcctggggatgagtagtcaggtgagggtcaggaacttgattccaaatatatgtataacattattatgccagtttaccaataaataaataaataaataaataaataaataaataaataaataaaataaaaaataatctccaaaatgttgcttccagggttttgggtcttaaggggattgatattacttcttccagtaatgacaaatacaagaatctagatcttaaagttctgtactgagtagaaatactgtctgttgagattagggagttgacattcctcccaaagttgagcattgaaggaaggaggtgggaaaattaagaaaacttgaagaaaaaatagcaagacaaaaaattttatcatctttaacaagcttttttaaaaacggtacggtaggaggatttgaaacattgcatacttgtctcatctggtctccaaaattgtaagaaaccttaaccaaaaatacagtaaaagacaataagtgaaagaatgagttcaagggaaatttacttaggcaaagacaaatagagtgggacaatatgcccaaaggcagtgaccaggactgctaggataagcatattttcagagactttacagcctctgtagtctcatttgttttcctcccattctccctgatgctgtcctcctcttatcacaatatttaagcaagtattcatacttgctatgctcttaaaactaaaataacatccttgtaaagggtgactcgggtgcacattatttgaacctggttccgttaaggttgggaagttggttgacatgttagggcctgtccacttctgtgcttgtgacactgtgatctgtagccagcctttgtgaggaaggcaatgtaaggatgtttgatataacaaccaagtagcaaagtgtctgcatttagcacatgctcattgctactcctttttaaaaaaaatcagtatactatatgaatagtttaaaaaaagagttttcttaactcttttggaatatttaaattaactaatattccacaggcagactaacagcagaaagaagcaaactaggaatggggtaggctgtggggcaattattttggaattaaattttgctacaacgaatctatgaaacggatcttacaaatgcaagtggtatagaattaagtgtagctatctgagtccatatttaatttcccaagaggattttgtgttccagggtcattcagcctctggtgaaatcatgattttgatgccttttagagcaagaccacttgccactcaaaatacatgaaatcaggaacaaaactgatagaaccttgtagcttcttattattttaaatattttaaaacttgatttaaaaggctttgccttctgttccagcactgtgtgcttcttctgctaggagaggccaacagctacttgttcaagtgcagagtgagcagctgaggactgtggtttaccttgtgttttgcagagggcctcttttattttcatgtcagattatctgtaaaatggactggttgtccctgtggtgctgtaaagcttcccagtgccgcctcccctaattgtgtggggagggagcatacccagcagagcttgttgagcagaggagactcttgcctcttctcattattttactactcatacacgtaatccctgtcaacaaggttggctgttaggggaaagaatacacatccctgcactataatagcgattgatttgcagctccttttctttgggctgagttaacaggaaactcctgaggcattaaaaatcagctttgatgtgatgcatgtgcaggggaatggcttttgctgcatttagggtgctgggggcagcagacctgggtccagtaggggagactaaaggccttatctggattctgaatcatcccttcgtagaatattaggtaacctcagcagcaactggcttcaccttttctcttgcaagttggtgagaaaaaaggagcatgtgggttcaggcagggagtttggtgagtctgagggaggtggatatgttgttggtttattttgacatgtgttcccttcagttattagtttgtgctatatggctattgtccacagctacaaaatgagggagactttcttctgtcatatacaggataaccatcagagtctagctgactcccatgtttctcagagtgccaaagttgcctgagctcttggaaaacaaaatacacgttgggtataggatggtgattgcctttgtggcagataggagaactaggacagcaggtgacataactacattttccactgaggtcaagcacccagaggcttctgaattgtgagggttttagcttcctacatgggccaggcaaaagatctggcaaagatctgttttctagagaattgcctcatctggaagtggaaaattattttcttagatctgtgtaagacaggctctgggaatcatcagatcatatttgggtcagccattcttatcagccacttattttagaaaagtggatccaccaaagacccaataaacatctttgtgcttggtaattgctctgctctctacttacgtggcatgctagtttatatgcttagctcaggtttgaaattctgtcgagagattcatatttctacagtcatcaaaagtaagcatccattatgtttctttggtattcgttttatgtaaaaagatatctttgctagttgagaaaacactaaaaggaaggactggattaagtggaaaccttatataaccttagagttttgaaaatgaatcaaaatgcaaaggaaagtacatagggtggagaaaacattcagcccagggactcagtttaaaaatgctggcagactggctctcagggtaactcatcagctaccaaacttgacatcctgagttcaattcccaggacctacatgatggaaggaaaagaactgactcctgcaggttgtctctaaccaccacatgcatgcatacccacaaacaaaataatgtaataataatactttaatatttaaaaaatgtaattccaatcaatttagatagtcttaaaaccttgcaagatgtgtgaaagcatgctttaaatgtcagtagccagtcaagagggcacagctgatagaaaacttgagcatttgagaacctggaggatatattcctgaaacagtcaaaataaataccaaggagaattgtctggcatattgatcccataacaaatgaaatttttagaaagctagtgttacctggccttaaatctcgagttttttaatggttgtcatgtttattttgggagataggcaaataaaatataacaaatactattgtaacaaaaatattcttaaaagcaatttctagacctcgatccctagtccattaaaaataattttgagtgtgactgtactccattaggcaaaaccacatgagttaatgttggagatttccctttatgatgttcatattgcaaatgaggagagttgggtacaatgagttaaagtaactggctcagcattgcccagaagggtgtcactgattgtttaactctagagtctgtcctcgttttttctgctcagtttaaactcatctccgatgaaccttatatggtctaggctcagtgtatgctaaagatactaggaagcccaattcttttagaaagctgcttactattaggtgagctgcttccatctcatgcatgtgaaatcaacaaaactccaaactaaatggatgctgcttttttgtgtttgattgtgctcttgtgatgtgttccttctatgtgactgatctgtaaacctatcctgtgagtggctcacagtttgagcctctcaaactggtgaatgaagaccattttgcctcgtagcaatttagaatgtcatcacacagccttgggtgttttgtgttatatttatttccagcagatgtatcttcttcttgcagcttggaatctgttatctgattagttaaaattcatgcttatgaaaaaaaaaagctgacagcatttaacttgtagctttctcagtttgttggaggttaaaagcaatgtttgtatggtaacagaatttcatgattttggtttttagtttgatatcatttttatttcatgggcaagcaaggatggctattttgttttctaagtatagccacaagcttaatttagtgatgatactttgtaacctaagtgtctatcataatttttaaaatctgttcatcttttttactcttctttaactggagcacatacctatgcttccagcatttcggcttccatttcctgctaactgacttatggagatttagggcacagatgaagtagcaaccacttttgataaatactgttgctagttttcctttcgagctcttcctttctgtcctgctgctatctcctgtctcaaaaaaaaaaaaaaaaaagacatcttaatacacataatagagcagatgggatagctgagtggcagtcacagagaaatgcttgatctagcactcttatcaatttatggaggatgccataaggaattaagttataggctgcatgttctggtgagtttacactttgaaaataccaaattgagacctgtggcttgacaaaaacacttttgggtggtttctgcatccattcccaaagaagacagaaattgaatcttatgccaggcccagaccttgtgacacatgcctatataaacttagctacttaaaattttaaagaaagagaattacaagtcaagctctacctggattatagattgaattcaagagcgcctgggcaacttagcaagacctgtctcaaaataaaaggaaaagttgctggggccacagctcagtagtagaatgtgagtccctcatttatttttcatttaattaatcaactttatttcaaacaaaaaaaaaaaaggaaaaaaggacatgagaacatacttttttaaaagggcttttttcttttggggggggtctaatttcaccttataagtgggtattttgcctgcatgcatgtctaagtaccacatgtatgcctggtacccttggagttcagaggagggcatcagatttcctcagctgaagttacagatggctgtgagccactatttgagtcttgggaaacaaacctgggtcctttggaagagcagccagtgagtgctcttaaccactgagcgatttctccaacccctttaaagctgctcttaataatatatatttgtgcatatatatgtggttcttgttctctacaaaagcagtgtatactaggccatctttcttgggccctgagctcttttaaaaagcaagaatataatcatttacattaacaatcctttgtaactggggccttaattgcttttaagatccccttttcattcattaagcagttagtgccacgtttgtttgtttgtttgtttatttatttatttatttttattgcatcttttaactaaaactttcagctgtgttacataggattctaagtgaggtgagagatgatagaatcctacactaaccactttgatctgtctggatagcagtcatagtgcaagtctcttgaagcttgaatgccatagttgagcagaaatagaagaattgctattttatatccttttataacttttatatttgatctgttaattttccccctactcattttagatgcagcttttactagtgggattctttactatttttactacctaataagggctttctgagacagaccaaaataattaccagctttgttaccattgaaactattttgtttccatactttatttattatttttaaatgaaatacatggtgagagaagccaacaagaaatggagtagaaagagcactagactgggatggagagtatctgtcaccattgtttaagcttgtgcatgttcaccatactctggtcagtgttcttatccacagacagggagttggttcttgtgaaccttgactctggggtgtagaggtgttgaagcctattgtacatttgtttattcagtattcagtactgaaacattagacaaagccttgttattatggcttaagataaatattacttttgtccatgtagccattcagaatggttgctctagacatacaaaccatacttcagtttacctcctgtgttcgaagttgcatctggcctttctccaaatccatatgagaatgagaagttatagccataacttaactgcatacagtagaaaacagtatgcagagtagaaaggggttatacaaagtcttttataaactagaagtgggcacaaagcaaattattaaaagtcttctaattctgttattttataataataacaatagtatgtctatttctttgaattttgttaagattgagacagtgtttatgtaaactgccttataattttatagtttatgtaactgccaacatagtaacttctcagtaaatatcatcacatattccaattagtattctggctaattctactgaaaaatacagtcctcaacatgaactcagtttatgccatctttatgattttctattcttttgtgcatgtatcagtagtgaaagaaatattaatagtgaaactgtgaattgttaggccttgtgctttatatctgtttcattctagggcctgtttttctttgtcttcagtttggtaacttttataccagtaattatatgattattccttcactaaactttttagatgacattttaatataatcagatatatatttttttctgaaaacacacttgatactgtactatatgaaactatcaagatatcacatcctcacagctgaccctcttgagaattttgcaagtttgcccatgtcaaagagtttgatgattgtgaaactctaacacagatcacttgattcacaagcaaagcacaacatacattttttctctttcttttgaatgttagattatatatgaaaattagtaccacataagtacatgaccaggagaacaagcagtgaatgatgttattgataagcagatgcaaggaactgtttatattgtcttcatatggtctctgtgttggttacagaaattaagtatatgaattatattatgaaatatatgaagcaaggcagaaaagatgtgtataaagatatataaaacctgaggggggtaccaaggtctacagatgttgcttctcaagttatatgtacaaactatctctttgatacttgatgcatatgtctcttgactctcactttgtaatgaacctgatgtattaggacctaaaagtattttaccggcttcaaaggaaattcatgaaatgcaccaaatgtctgtgcttatcaggaaaattccattgtagtcatgaataagacacattactttacctctttctggcttttgggccttggataagacccatctcgcatttttatctagtatttaataccaaagtagtagactgggtgctttctaagcttgtatataacaactaaagactaagatttaacctggagggaattgtatattgaggaattagaataattccatgtatttatccactgtagtgaaagaaagtcatcatttgttaagtcagtgaacaatgtactgtttttatcatagcacatagagctctgcacactacagcaaaagtgacagacacagtgccttccaactagaataatagcactcatgtactgagatatttggaatatactaaccttccttatttagttttatgtgttctcttgaagattagagatctaatatccacattaaagtggccattgtaagtgaatattagctttcaaagctatatagacataggtatttagtaatttaaaaaactcacttggtagcaaattgaacatggcctgaattaacttgaaatactaactttcaattataaattgttattccagaccctgctacaataaatgcattatactggccccctcaagtaccccacacactaattctcaagtgcatctgaccctgaaggctttcctggtgtgccttctccaagtctaatgtcaggatatgcccatttgttatctcttattctgccaccgaagaggaaaagaaacaaaaatcttgtccatttcagctttccacaccctgtatttccatgacagagcttgtttcacttttactaaatagggagaaggaggaaaattcaggcatctgctccaaaccagttagccaggagtttcctgtccagcatcctctttaatttagctatgaacagttggttgtcaaataaatgaggctattgaacagcaatttataaccttcctcttgcatttaaatctcaacgtattcattatgtcaaggtagagttgggtgacaccatacccactaaagccacacagtctttgcctgtgtggtcttgctatgtatgtcctgagatcttgatagtgcaatggtgattgactccatattttttaaaaaatatataaaaattgcatgataattctctttcagttatgtagacaaggggcatgaaaacagtgccttagaccaaatctttgctttttgtgtggcctgtgaaggaatagtgttacactcttaaagccattgtacaagtacaggaaagaaaatgcatcaaacatgatatagattgcaaagccttaaaattaatactgtcaggccttaacagaagaagtgtcagcttgttgtatagatcactgacttatctccacctgtaatcctatcttcaaggttagttctttctttttgaatgcttgttctcttttttttcttcaagtcttctgactaggttgtcattattagagggcctactttttccatgaaatgataaccctataataaagtaactttatataggatatgctcaaagggacatttaaatgaaaatgagatacagcattaactgaacataaacactgaattattttattatcaaatatacagagagctgatgatggagctgccatggtgtttgacctgatgacttcgagctgtccttgttctcatacctctacctcctttttttaaaatttcttttaaatcacatgattatacatattttgaataccaagaattgtttttaaaatatcatccagttcattactctttaagagaatggaatttttataataaggatatgtgcctacattatataattctggagcaccagtataatttagaaatcagacaatgtgatttttttctacattttgttacttatacatatatacatattcatacacatacacacacacacacacacacatatatacacacacacacatatatacatgtacatatacatgtcatggtaccatattttttgttcaaatactagtgaaaatcatttgggaaccagaatcagaaacaccaggttctaaaactcatttcattcctggttagcttttgtcatcttaatgtcactagttttgcttgcttaaccactaaatattaataataataacattcaaataagttttgtacaagtcatgtgtggtgataacatggagaaaaggtgtaagcaaaactaatgaatttatgatagttttatgtttttgtgtttctaatttggatgtttgaagagaaaggggcatatattcctatagtacataaactcaattaaatgactatgtcagtttgaattgcataatgagtctttctaaaagttagtactgtaaaaatctcagcgttcttcctgttagctgagagagtatgaatgagagattttattcaggttaggctaagctatgttgacgttgctcgtataactccagtcagctctgggtgatctagaatgtcttcaactcagaaattagtgtctctgggtgatctagaatgtcttcaactcagaaattagtgtctcagaggtatcatttgttaccctctcactgccagcagccagccagataaagcttatttttttgtcagtgttctgtcaggtttgctattggaacattggccaaagcaagtagtaaggctaaagctagcatcagtgtggcaaggcactactagctatggactatagggaaatgtcagaagtcatggatgccatggtagcccatctcccacagtggtcttggaggcagagaaatatctgcctgagtgggaaccagcttggagcccaatgtgtgtgagtcatggtggtgccatatctgtgtgaatgccttatattatttcaatgcctatgtactcccttttctcagccttgtattggaaacattaacaccgtcgctgtcatttgattgcttcacagaagtagcttgagcacaaatacgcacctctcatgtttgagataccacaaataatattgtttccaagacaactttggtgaaatgtcagctttctctctaggttttaaactcctatgagaagcattgttatgctcatgcatgctgagtaatttgtataccacagtagtttgtttggaaacatgcctgttgttctttaaaatatgcttaatgctagattagagaacaggatttgtgtgtgtgtgggggggtccccctgtttatacaagctcatttctaaggcatttaaaataaagagcttgggcctgtatggtatttaaaaacccttcacatgatgtttttaaaacagatcaatttcagcattaaaatgttaggaattcagccaaggagcattcagcatggattgtatagctgtaatgataatgtattataactatcttctttgaaagtgattgtagcagcacagttcaacctggtgaattatacaatttaagagtgtttgccagaatgctattggagaggaattttttaagcctttcctgaaccaaagcaaaatgaaagatggattttattatgcagtacttaaatcataagaatagtcatcacagaatatctaaaaataattcatttaaattgaacagaaggtcatatgtctgaatgtcagttatcacatttaacttcttgccagaatattgggatgtaagagagcatgtattttagctactttagttgattttaaaatactttgtttgcttctatctaaaatctctgtccaatcaaaggtaatcatatagttgagaccttattgagttcagaaattgactgtaattaagaacataaatgccaatatagcattaattcatcttaaaactttttttttttttttttaagaaaatgctcacataggcatgctttatcctcaacctagtagcctgtctctcaaggaacctgtgtgttaggttgttgtttatttgtttaaatcgatgaattttgttgtggtgggtgtgttatagcctgtctgctgctatcttttttcacccaagaattagaatattttggatagttctacctataactttgcagtataaattttattttttgaggaactaatacaagttgaattctgtcagttcctccaaagcagaaagacttgcagcaggattgcagaaaggaatgagaggaaaggacaggacttctccgtaaatcttgacctagcctctaccataacactgaaggtggtgcatgcttgtgtgcattggggtgtgtgtgtgtgtgtgtgtgtgtgtgtgtgtgttgcaaatagtctagaagatagttaccgagatgtggcatcacccttatgagaggtacatatataaatgaggacatttttccagttgtattgttgtcaagaacacatgcttaatgagtaattaccaaaaaactttgaccttattatgtatataatgttggctcctgatgtgggttaaattgcatccatccaaaagatgacatccaattctcatccctgttgtctaggaatgtgacttcacttggacataggatcttggtggatgtgattaagttaacatgaaggtcacactggaagagtgaggttttatctgttattaatgtagtaattgctatgtggtgctaacttaatgagaacttacagtaataaatcacaaatgatacacgttgaaagcttttaaagttttgtcacttagtgctgagccaggtgcaggccctgtatttatcatgcatgtgtgtgcactcgcacagtaaaacttgtctgtgtaattagtatatgctaattaaaccatttattttaaaaaaaatggcttaagtcagatttgactctagatttgtcagcaagctacctgagcataccccccctcccacacacacaccctatctcatctttgtcctcttttcttgatctcatgctgctaagtacttgttgaatttctaacatgggatcattgttgtaatttttaaaaagccacttgagatgagttcaagcagaggttttcttttgttttttttttgttttgttttgttttttattagggaaatggattgtaaaaaagggaaaggggacagaagcagcaggagagaggaaagagaggcagagagaggggaggggacagatgggggcgaggtgggaggtggacagggccttcttaaaagggaacatagtgagtaggcacaggtggcagcagctgaggtcatatcctgtcagaactccaaaggcaggccaagacaaatgcctaaatactaaacacacaccctatctcagctttgtccttttttcttgataccctgttgctaagtactggttgagtttctaacacagtacctaggtatcttttcctttgacttttataatgtaagcaaactcttaaaattaaagaattgtcttctgttatcagccattggtagtcagtcatacatgacttgcattatttcaggaactcaggtttccttctgtctaaaatgagaaagttcacaagtgcttctcacatttccaattactactactaatactactactaataataataataaccaaaactttggttacaacacatgccaatctaggcagtttgataggaaaaagctgaacgtgtataccagcaccacctcctcttcccctttctcccttgcacatgctacgcaagtgcgctaccactgagctgcatcttgcctttgtttttactgtgtgtttgtggtggtgatggtgtctcagtatgttgcttatgctgcccttaaacttgctgtcttccttatctttctgcttcagcctcccaagtggctgagatacaggcctgaaccacactctctgagtaacaagaaactagatggtttctttgagcccttgcaggtaaaggtgggacttatcctaccctattgagtggagctcattgaaactatgagctttattcctcctgttgagaagacctattcagttatctttatatttttgtatccccatctctttatattatatatcgaaagaaaggtcaagaacagtgtgaatttggagtttgagaaggccttgattgcagttcttaataacttacctgatttttttcccccttctggtttgatcttttgttttggggctgaagtaaacttattacttaaagtacatgattatttttttaagatttatttttattttatatgcattggtctctcccctgcctatatgagggtgtcagatcccttggaactagagttacagacagttgtgaactgccatgtaggtgctgggaattgaaactggatcctctggaagggcagccagtgctcttaactgccaagcaaactctccatcccagtaatccatattagactctacctttcagtgcatccttcttgtgattgtttgctttgtgtttcccatgttcttttatcccatagtagtgattacttatacagccatccatataactatagtgggatgtctcaatccttttgctcagtatgacattttgggccacttaattacagtacattaaatgatgtgctttgctgcagaatagttaaactgcagtgtgaataacatctttggattattttgagaaaatatgcctatagtacagtttgagtttgtaagcagaagtagttagttcttctaaggtaatgccttttacagaattatttctttattactgtttagttggattgatgtcgacagtgaacaccaagactttgatgttttatgtggtattcttcaccactacactaatgaagttaattagtggggaagaatgccatataaaacatcaaagtcttgatgtttaatcacaactttaaagtcttagactcttcagttgccaaacatatttcaattagctgaaggaaggtcgaagattctgtttcccttctctggctttcaaagattttccagattcttttctggttgacatttggtacttgagcctgaatattaatctagacaagctaaagtggcatgtggaggacaaaaataatctaacaaactacaatctagtctcattgggatcttcagtttcaacaaagggcagtcatgaattctccttttgagtattaatgaagtaagtataactgatttaataatgggttgtattgccttgttttctgttgtcacaaggtatatttaaaaagaaaaaggttttattggctcacagttttagaggctgaacatctaattggggtgggtccatttgttggtcactggtgagagccttatgtgacataatggcatgaatatacatgtgatgggtgggaaactagagcgattcagcggctgcataaactgtaataatctctttttgaaggtaactcttgttgcctagttaccttgcactaagcctcttctcttgatggtcccaccacctttcaaactactgggcgcaaaagaacaggggcttacttggttcatctctggataaccatggacttgtgttctccaaaactcttgagtgttgtcacattagagccacttttctgtgttacggtgtattttaacctttcagctagggaatcctgtatttacatgtattgactgtgagtgaaggctcctcaaaattgtcagaattcctaaatgaccagtagctgagcaacaggagagccttctcctaggttattccactccagtatgtgtttgcttgcttgcttgcttgcttgcttgcttgcctttccttccttccttccttccttccttccttccttccttccttccttccttccttcctttcttccttcctttcttcctccctcccttcccttcccttcccttcccttccctttcctttcctttcctttcctttcctttcctttcctttcctttcctttcctttcctttccttttcttcataaggttttacaatagcaataatgtaattcagataagcatttactgtaattgaccttgatgataagtgtccttggcttttaccagtttgcttaaatcctgaggatggccaattatctcataatacccacttcattgagattattttttaattatcacattcaaaatatatctctttgtcagcattgtagactaacacatgggaatgtgacattcaggcgttcagaaagtgggttaagagtgctgcgctttgtatcaggacaggtttgcagttgaagtttttattccttacagctctgaactatgattttggaatttgcaatttcttatctgttgatcattatgggattattggcttcagggtgagaaagtctagaatctccttgagctaattgtgttcttgcagaggtccctcaggtgaggtctggtgccaatgggtatgcagttccagttgattagtcattctaattgatagcaatcagcagtggcttgccattagctgactctgccttaggtcagaggttgtcaactgtggaatcactaaggagctttataaatataattgctctgggacagggccagcatgttcctctccctctcctccactcccccctccctatcgctcctctctctcatgccctcagtcccctctcccctccctttttctctctccttatgtgtagcaatggttgagtgtagttgtaagccatttggctgtttgtttgtttgttttttctctcttacttccctgataaatacaaggatgcttttgtcacatgccttacatggtcctataagccctgtgaggttaggagtattctcatggggtacctaagactcctttctgaattaagaacctggtttcagttttatgtacacatcatagttctctgaaaggagccatttaactgattctgacatctttctctggttcatcctcttctcatcataattgctctgtgatgcagtgctagataactggtggttgctgattggttcttgcttcaagctgccaagacaacctttcataatttcattcagaactttgcttttttattttaacattaattaacatgcatacaaactttatattgtacatttataattgttcccatttttaattgcaaaggatggttgtaaaaaaaatcttttctgtccatggggctttcgaagggggcagatgggaatgattgaaaatttagattatttccaaaaccttgggctcgttttttaaaactagactacctttactgcctatcagtggcatgtagagtaaagtgcaggccttactgtggcctagtgggtctgcacagttattaccaccctacttttcatactgtcctctgaggcattacccactctgccctccatgtgttctagttccaccctctgatttatctcttttgtagcagaatgttcacactcatttttaatttatcttattaataacttgggttatgccccctatttaaggtcctttgcctgttcttcctgtattagtgtcttgggcttggcactgaggagggctcgatagcaacacataagttttgcaaggtggtgcagctgcctcttacctaccattgtacttgctttcttattgaagttatttgtcaacttgcctgaaactggaggtgcaggtatatggcatttttctgtcaccatgagtcagggttgttctagaggcatgtttaacttaaattctacagattggggagaaggcagaactttaagcaccaagctaagtgtctagctagaagcagagctgtttacatctggagaattaaagagattctttctcaattagctttactttctttctattcttcaaagcagatctatcagcttccagctgcccagagtgggttcttggctagggcttggcctgtgccttttatggcaagttccagaagtaaacagaaagaaggacagaataccttctacttcatgtagttatcacaagaaatagtcatgggctgccttagttcatgccataaactgggtagtttaaacaatagaactatacctcttgaagttcagaaggcttagaagtcctggtcagggtacctcccattaagagtctttactaatggcccatttttgagtcataaacagtacctggcttcgttcttcatattagtgggaagagcagatgcttgctctagctgtcttataagctcactcattcaactcataaggctccatacttgacctaatcccctttcacaggcaccaaatacaaactctttgtgctttaggtgtcaacttaggagttatatttgaacatagacattcagactgtagctggcaatcattgtaggacataaactcttatctctgttgggcagctttgaaagtagaaacctagaagggttgcctgacccacaatcacatactgataaatgctagacctgaaactgaaaccagagttcacacactagagcacatgcttattgcattatgtacttcttccttgagatttctatgccatgaaaagccggtgtcttgttcacctttactccctaagtatctaacattgccaacattcagttcaaggagtagctggtatcttagcacaagtgtgtttgatcaaattatttctcattactagctaggactaaagttctgcactgaatccctttgtccctgtgccatagcaactaatgtcctctccttcccactgtcttcccagtggatggaagtgtggtgataaattgtgtatgatttattaaagcttgcctgaggatccagaaagcagtcagtctgtacaagccttagaagccaggcacacacctttaatcctaggactcaggattaagaggtaaatggatctcttcgagttcaatgccacccaggggtacatgagattaaatcagtctgaaagagtaacagagtgcatgcctttaatcctaacattagggaagtatataagacagaagcaaggtctcaggagaggcattcattctccagccatgctgaggagaggcagcagtttgagacttagcgaagagctggtgtgtggatcatccctttcagcctgagctagagatgagagctagtaactggtcgctttgcttttctgaatcctcagtcaaacattaatgaataatacatagaagacagtgagtacctgttttggaaaactttcatcagtggcccaaatgtctgtgatgtgtcatttgattgatcctttgttcttggagacattcttaaaagcccttagactggaatgttctgaaacaggttcctaaggtactataagccacatgccagatcataagccattggtcttattaatggagagctgccttgtgatgggatgtttatacacatatgtgcatatatgaaaagagagaatagagcacaaaagcaatacctgaattccaaattacttatattcattcattttcttagcaaacacagcattgtccttacactacaaagtgaagtccatcgagccatttcagtttaatagcaaaagtgaacccctaggctagtgttctttctctttagtaaaatggtgattgatcaaataatattcatttcttttctccatattacaaatgtattctcttctagtccattctcagcatgctgctattatggcaccaattagcccaatgctgagttgcagttagttccatccagttctgtttactgaatagcactgtagtgattaaatgtcatagggtacaccaaatatacaaaagtaattaacccagaaagtacatgttaaaataaaggtcaatagcgtctttagcccatagtgccaacagaaagactaagtattgacagaggtgttgctggtaaggtctggagaaaagaggtgtgtgggggggtggggaggtcaaatggggagaggaagtgtattcatactggtctactatggtaagtagaataggatgctaagatttttctcatcagattgtaacagccctctacttattgtttgcaaagaaggtgagacagtaagctataattttgacttgcctgtcaacatttcagcactggttagtgccaagctctgtttttggtttaatcagaataatctttttaaaaattaagatgcataattacatcacgttctctcttccctttccttccaagtccctcctacactttccatgtacccacacttcaattctctcaaatttatagcttcttcttcttccctgtttgttgttgttacatatatgtacatgtatttatgtgtatgcacagatatatgaatacaactggctgaatctttttgttgtttgtgggtatatggtaaccagagtaatcttgctgcaggcttggtgactcagcctttcttccagagtttttttacccattgaaaccctggatctgcaaatctacctgtcatacaaagctattgcttaaagtcatttctcttgaaacctttgcacatatatctaagaactttcatccctctatatttgagtcaccatcaatcagagttaatattaatgcatttttttacatactaaatatttgcataaagcaacaggtagtcagtaataaaaaagtcaaccaataggaagctctttctcataattattgtatctttctgtcttatagttagcttttttgttgttgttgtttccatttgtatgtggtgatttaactgctcaaggggggaaaatagaggattttttttttcttttaggtataagcagtaggaagaaatccctagggaccaccagagaaaaactgccattagctgtattcttcccctgatgggtctctcagacatgattccttgagatctcaccttttcactagtcaatttccagttaaaaaaaaggggggggtggagcttctccctgactatggacagctactgatcacatgatgagtaacagggatgaagctaactgaaaatggcccctctcttgtcagaaatgtatctcttttagaataatgaaggaaattggtggccttggtatgtttcctcaacagcattcaccatatatgcagtcagaggcaaggctggcacagaccctgaaggaagacctgcaccctagattggtggagttgcaacagagaaaggtatcactttggattcacctctacccaataccacatacatctatcagttttatgttttccactgtttcctcttaataccttttcagcctaattcagaaaattgtcaccctctcactttcaaaatcacttttgaaagccttcctcctttggtgttcctacacaaacttccacccactctccttcacagacacacaacttttgagaccacagaagtgattatattgaatgtcaaggattcaaaagactactatcaagcagtatatgcttgctacatgtgcacaatgtccaatatctagataatgaaattacacgtgactgagagtatttgttcaacagttgtaattgaggcaatggtgcagatgccaggagagcacatgagggactaagctcagactcacaggaggtcctggtctggcatcacagttggaaaacctttcagaatatgacagttggctgatatagaaaaactgaaaagtacttagccacacagaccatacaagaaaattcttggcagaacttgcataaaactctctagtgaaaaacttgggtgtcactctaagaaagaaaaatctatatgaaattggggaaagtaggcagggactgttctacctgtctatcatagtgctggggagttacagtgttaatgaattgtttctcttgtggctttgaaaacttttggatttgtgttgcctaatatggtagtcacaagccacacacatctttcaagtaacagaaatatgccctgtccaagatgaactataagtagaaactgcaagccaccctttgaaagtgtagtactaaggaatagaggttgcaaaatatctcaaatgtttatattgcttatgtattgatagggtatttttatgtctgaattatatatgtaattaaaattaattttagggtttcttttatatttaatattgtggctactggaaaaataaatgcatgtgtggctatattacatttctattgacaattttctattcttagtaaaactgactttttgttgaaaagcttctgggctgtggggccttttctgaccttttggtaagcagaggccctcccagaatggggcttgtgcgtagcatgagtgggtcgtggaattcaggttgggcgccaggtgatgggaaagcttgttggttcaagatacctttattcggataaatatcagccaaacgcaaaccagagcttgccaggggcagccgagcagcaaggccagggagaaggggaaggagaagaaggggcttccatgtgctctgcaggccccttaagagcccatgccgcgtcatcctgacctcatcttgaccacgccttgacaggcgtggcttactgtccctacaagctgtaattgaaaactagccattctgtcccaacatgaagaccagagagaggttcaggttaacaattttaaaactactaggcagcttatctttaaatttgttaattgttattccttctatgttcctgcagaaatgctatcaaatattgtgtaggacatttgcctgaattacacagaagaatatatgtgaggttctttggagttagcactctcaaataaatttgtttggccttccaaatagattaaaatagtttactagagaaacatgaaaacagcaaggaaaggatcctaatacattaaggtatggtttgccaaagcttagtgctaagtcactaccctgctttaattccttcaaacagctgttggaattatattgatatttacacacacacacacacacacacacacacacacacacacacacacaccataaactagttcttaagcaattcactgtaccagaaaattcagaaattttgccactttggtttttagaacagtcaaatttatacaccccattgggtaagagtaagtactgttaataatatgtcagtaggtaagagttgtgcaggctatatcttacatatttttattcttccaaaagaaaatggccaatatgtataactctaattagtgtatagttcatatccaaatattttaagtatcttgttgatgagagcaggaaattcttggggaaacaaaagcacatggctgtcttaaactttgcatacctgaagaccattgaattgaagggcaagaccattgaattgaagggcaaagaagattaaacatttgcagtacaaagttgtatgtgcttggcaaatatttattacagcttctgttaaaattgtgataatcaagatgaagtacttgttcccacactcacacacacatgccctgcaccattccttactcatgtggcctacaatgtggaccacatacagggtgactgacatgaagaaagcttagtcacctgtataagaagaatcaagcccatatctttggcatcaaaacgtcaattcttgaccctgaagttgccagaaaaagtaaatgtatttaatgaaatttctggggcagagccaacggctttattccaggaagaggaaataacagtcaagaaacctcaagagaacattaagacgatgttctaatttaaaatcaattgtattgataccttataaattattagggcattttatcctgaccaagtaatgcataatgccgagtccacaaaaacaaaacacaaatgactaaatatcatagtgctgtttttctgtttgataaggaaaacaatacacatacatgcctttggtattctaaatactttgacttctgatgggagggcaagctgtggaattcatttatctgttttttgtttgtttgttttacttcatatattttcagtaaatccttgttgagtgagcccgtgagtgaagattgtacagtagtttctaccattatcaaagaggactggctcttcatataggcttattataatagatgctaagtactgtgctcacaatatgagctcttcagtccttaatgacaccttagagtaatgtcccccaccccccactcaccccaacctgctaggaaatgaaaatctcaagaattttagtaagttgtcctaggtaataaaaaaatgatatggcctagtcttgaacccagctatctgacttttatgtccacagtgtgaaaactggaggtgctgtatcaaaatcatctaccagactgttagtctttctggtttgatgttattttgattatatgaagcaggttgtcttgacccaggttttttactagaagagaaaaagacaacaacaaaatttttaggaatgtgtccttcaagaaatgctacagagataagacttctagacttcattaaatggagattgtgttaaatatattttttacaagggcagatcttcaaaaaaaagttccagtcatttttgaaggtgagttttgatttatgttaatttggaaaagcaaattctgtaagattgtctgcagagtatgctttttatgacatccttaatcaagcaggttgtttaaataaaagtcttggtgtaatgagcagtaaaccaacaccagtgactaactcagaggtttgccacagtcaacagcagtgtgctctgaatgttagttaatttacataaatcttagtgtaatatgaattgccatatgagacatgcattttgaccaaatgattttcatttttaggaattgatgttttcaaaactaaggtttattcatttgttctctgggaatatgaatattttggttaatattagtcaataaaagtatcagtcagatactactgggatatggtaccatgttcatttggtgcacataaatttattgggctgtcaaatttatttcaaaaccctggagtatttgcttcattgttgagacacagcaaaaaccatggctttctggattcaggggctggaggagatgactcagtagttgagaacacttactactcttgaaaaggatctgactacagttcccagcacccacatgacatcactccagttccagggcattcatgacaccaggcatgccctccttcaggcaaaagactaatgcttgtaaaataaaaataaatctttttgataagtaagtcactattgttggctcttggtataggatgcatcttcagcttgtctaagaggctgcagaggaaatgctgattcagaactttggttttagcatcagtaaaagacctgtgggtgtcttggccctcctcctctggcttctctgaacttaccatgacacactcatactaaggtttgaaagttctggaactacatttcagttagagtaacagcaaaatttgtcatctaaatggttattgtttgagaataaaagaagcctagaaaacaaagcaaaccttaatcagattttcatggtgccccttggctcttcatttctctgtttccctgtctaaaaactcacttactctttaatacctagtagataatgaagtcagtaccagtgactagtgagttttaggatttttttccagatttctttgtttgtttgggcagggcatacacatgccacaaaagtatgcatggaggtcagaggaggaggaggaggagtcctgtctcaccttccactctgggttcgagtacttttacctgttgagctatcttgccagaccaaactttcagggttctttatcttagatgtccatttaaattttagcattctgcttctaggctataagtgggcagggatggctaagcatagcaataaaaagcagaattagtttggtggacatttgaaattaaattagaaaatcccatgtgaatatggtatttatagtcctttctctgtcgtatagaatcagaattttactatgattgttgaaaggttatcttttggttcattgaaaccctatatcatgggccattggaatatctgtgttgagttgaagtactacaaactgcctagaagactcctcacatggacctctctttcccaatccgtagtaactagaatgaactaaactacagtatacagggcagtatcaacattattgccattgagaggataggctgtgtgtctaagactgtttcttgagctttatataaattgttttccttcatcctcaaagcagcccagagtggatgaagatagtatcttgttatcccaaactacaaagggactgagtgaggctaaatatcattcctggggctacagagctgttaaatagaagactccatactgtctgactccagaggtgctccctgtcattaaaattagctaattatattaattcaaccttctttggagaatactttacacaactctttcccatacatgctgtctttgatctgtaggtggacaggtatgggccacccatttcaagtttgtggaggtagtactagctctacagctgatttggccaacagcctcagtacaatctaaggtgaatttcaaaatgagatctaggaatttttcctttttgaaaaagcctgttttacaatactaagaatatctgtaaagtacatttgtgctgccagtataattagggttttcatgggaaacataagtttgtattatccccccttttttttttactttaaacacatcattttgtttcttttcctgtaaaaattgattttttattgcataactttacaaagcattagcatccagagtatttttgacttctaaattgatctgcttctatgactacccatgtgtaacatattgcttatattatgataaattataatgaaaatatttttctgaatgagtctaaatgtttagatttatacagtgctataatggagttccagtaagtatcttaagtagtaagctatggaaataaccaatctaactaagcctttttataataatcaaagagatgggaaaataaacttttctagcaaaggcatggctggctttatcatcatttaagtctctccattcccacgctcagaaaaagacccaagtgcccatccagtagcagagtggtagacttctaagctgtgtggtgagaacccatgccaagtcagtttgactccagagcagttatgttgttagggtgtcactgatcacctcagtattcactgtttggcttaacctttaaatgctagtgataattattttattagcactggatggctcagtggaattcagatccccaaaacccacaaataatcaaagtgagcatggtggcccctctgtaatcccagcagaggaggaagacaccctgtttgtaaatgtagttgcctagctagactagaaaaaaatggttggctctgagttcagcaagagaccctgcctgaataaataaagtgggaagagatcaaggaagacaccacacatcaaacaccacatgcatgcacatatgcatgcaaatttacatacagatatgaatgtctctctctctctgtctgtctctctctctctgtctgtctctctctctctcctctcaacacacacacacacacacacacacacacacacacacgaaagaaagctgtctatatgaaagacagcaacctttaaaaaagctatttgattttacatgtgtgaaaacaaataagcactaagactaaataggtgtggggcagtattggtgaaagtccagttgtggggcatacctttcattctggcatttaggacgcagaggtagccagatctctatgagtttgaggctagcctggtgtagagctagttccaagacagtcaaggctacacagagaaactctgtctcacaaaacaagacaaaaagactaaacaagcattttttagcattaatttttgagaatgtatccattattgtttaggaattgtgtttttttccctcttttgagtaaagttgaaataactggaagtagagagttgggctcagatagtgttaaccacacactatcttcttcatttataaaatactacattagtaggagaaggcatttcattgggaaaggagtaagataaagaaaggatgaaactcccttttacagtgccaaggcaccctagcacattttactcagatgatatcctgttaatgaatttcagtgtatctaatgagttttttttaaatagtgttattgttcttttgagaatttcatacactatattttgatcatgttcagtccttatccccaactcctcagatctgcctctacctccccagtcacccacatgcactttttgaatgcatgctgttgtagctgctgtgagttcctatgtatagcttgccttattatatccagaaaacagtttcctttacgtctttcagcctccccgtccgatagattcctgaaccttgaaggggtggggtgtgatacagatgttccatttaggtttgagcactccaaagtctctcattctcttcatattgaccaattggttgtaagtgtgttcattgccacctcctgtaagaagtagcttctttgttaaggattgacagattttgctgacctatgagtatagcaataagggattaagagtcatcttaattctatgtgcattttagaagaatattaatatattcttccccagggcctatgacctatctagccacaggttcttagcctcattgatagtgccacattcaagttccatcttatagaatagaccctaaatgtaatcagaaagtggttggctactcccttaacaatcatgccactattgcaccagtggccctggcaagccaggtaattattgtagcttacaaagtttataggtgagtacaattgattatgtttctcttccagtagcatacattgaacaccccaccccaccctcagccctatgaaagctagctagtagagatgaagcttccaattgagtatcagcttattctatgactcttgtatgtggtgtctttagccatagggtcttactgtcattttctggatggtaaccaagagcagtggcagtaacctataatgcttagttgtctatgggattccattggccaacaactcaaagaggtagtaattcattccttgtttttatttggtggtggtatcttgttggggtatccccccccccactttaatgtacctctatttaaacccttttttgtatgtacatattttaggaagcttctatgtgatgtttcttctgtcctgcccctccacttccaaccaatttatttatctcagaggttttgaactagattgaaatacatgttcaggggtcatgtggaatttgtttatgtttaaacattcctggccagttctgtgctgcccacctcaggggagctacagtctgaagtaggaagtggttttgtaaacaagcagcagtctacttattccgcatgttgcattcattcaatgaatgaacagcatattaagggaacaacaagaagggagtaactaattctgcccgaaatcatctgaggaagctttgaaaactcaccttaaaagttggtttttatgctggaaagggattttaaaagatactgagccaaagggcacttctgtaatcccatagagaaaggctacagatgctgtgaaaataatagacttctgaggaacatgctcagtgagcgcactgatgggacacagggcaggagcaggactatggattggggctcctagtaggggctttggaatacagccgaactcaggagttcacatgtctttcctacagatgtcttttctatggctgtaggaaaccagttaccctttttagagaagaataaggatagatgactgaaactattttggggaaatagaaaattccagaagtatggagaatgtattaagggtgataattaaataagaaattctgcctggaaaccgttggtctttgtgtggcttaagttggccataaaactatactaaattgggtttgataagagtaaaaagcaaaaacatcaagttttatggcttagaaataaaccataactctgtaggtagaattataagttagttatctagtctccttttaaaattgtgtgggagctggtgatttagctaaatggtagagagcatttgccatgttggttagatccccatcaccataaaaacaaatttaaaaaatgatttggcttatggtggtttgttttaggctttgtccttactgaataatgccaagggttttttctgtcatttagtccaaagttggggtgggttgatacagagtttatgtatgaaggttagggaacaacttgaagtattggtccttacctttcttatttttggaaaaggttttttccttgtgtgctactgtgtacagtgggccagctggcttctgacctgggattctcttgcctctaccttcgatctccctatagaagggctggagttcctggcacatgctgttccttccagcagattcacgtgaagttttagagaggaacattgaggccactggaccatctccctagcccgtggcattgacagattcttgagggtagttttggttttcacttttccatccatagttttaaactatcatacatgtgctcagtcagtaatcagccaactttcatagcagagagtcacctttctcaggcttcaaatcttatcaccagtgtagggacacctcaagttaagtgcctgttgaaaaaaacatacatgaagtctgaggcacattgccccttactgtggtctcctgaggcatgaaccctcttcctctactctggccacagtgagtttagggtttccggaaacaaaatgagtaggcatatgtagaacattctgaaatatagttgatgtttgaagggatttttttttccaggctgtacatgtaggctgagcaaaaatactcttgattctgatccatatatcacatggccaccacatttggttgttcaaatccttaatgattatttttccctttttttttttttaatcaaaaaattaccggttatcctttaagctcaactgtgttcagtttctctgtggaaatttcaaatactttttgtcagctagtaaattttacaaaccaaaaccagcctatttttctctgtgtgctgtttcttgtgtttcctcccttccccaactttgtgaaagtcttaagcaacatgcttgcaatgcttgagaccagatctactctttggagtttgtactctgtctgcagtcttttttattctctcttttgctcatctttctgctttgtcttcttcctccatttctttccctctatacctctgtctttctcctttcatcacctccgtcacctgtctcctcctaacaactccctaggcatgtactacagaacacgcaagaaaaataaaatggtttaattgctctcctaagtgaatgatcttttttaaatcctgcttctatttctaattccagagctcctcggtatccccatcagccagtttccggggttctgagaaacacaggaactctacagactattcctcagagagcaaaaaacagaaaacagaagaaaaggaaattgcagcacgctatgtaagttcatccacttttactttgggggaggccagtttgtcttgttctttatcagctggtaattttaaccattacatgccaattctagaacataggataacaatatcctttaagagtttggtttttttttttgttttttgttttttttgttttgttttgttttgtttttagtatggtatttatagctgtgttgaaagttatctccatcagctaactgaagctgtgtgtgtatgtttatgtgcacaaacatgtgtatgtgtgtacatggtatgtacttgtaccacatatacttgaccacaatgctttcctatatagcaactaatctaggatctgggtatactgagttattatttatgtcagggtaatttatttccaaaactttatgtggtagcttagtcatccagaatgtccttcatgtgacaggtcccatacaagaagggagcatgctgggtaggaactgtggaggcaggtatatttgttgttctgcttcccgtcagcaggcttcacaagaagctcaaactttggatttttaccaaaccatgcccgaccacacttgtattctgtttaggtgggtgtgaaagtttgtgttctgtgttttagagtactaagcaagctgttttacaccatatttcaaagatgggaaatggaataatttcctagcttatgacatcaatgtgaaagaatagtgagtacatcgtaaaatgttttaagtatgtcagtttagtacagttttcatcatataaggagctggtgtgggcacatacatgtagctgaaactaatgttgcttgtttttttttttttttttttaactgggggtgaagataatgcttctcaattctctgcaggacagtgatggtgagaagagtgatgacaacttagtggttgatgtgtccaatgaggtatgtttgtggcttgctgcacttcctgctgctctgctaaactattactgactttatacaatgctgggccttttcagaagtgctgctccttcctttcaaatgccactatccttttccaccacaagaaatttgcaggtgtcagcagtcaccctactgattatagtgatgctccttgcggattaatagactttttgatttttgtttttgtttagaatctgacctcaataccaggtgtttcctttagcaatttcagttaatttgctatctttttcaaaacattttgtacttttaagcaagctattaagttctttcagttagaagacttccccagtcaaggacctcagtgatgtgagtcagctttaagtcttaaactttttctttgtaggatccatcatcccctcgaggaagcccagcacattccccaagggagaatggcctggacaagacacgcctcctcaagaaagatgcccccatcagccccgcctctgttgcatcttctagcagtactccttcctccaaatccaaagagcttagccttgtaagctaccccatccttaccagaattgccacttccaatatagttgttggactttagtttttcagtttttgtatatttcatgtttttctgtagggtttggatttccaattgacatgggtgtgttcagatataagtttaaatagaaaagatgtttggagcagaaaggtttactaaattgatggtgtttgcttcctgagtctttctgagagagagacagtggatgaaaaagagagaaaaacatcttactaaagttgaaaacaacacactggaggtagagaggtggtcttactgcctgtggtttgtggtgaacttggtttggggtttcactgtcattttattactggcttcatttgaattgccaagctatacacagattcgataattttagcttctgcctcagaagtttcctatcactttaaaagtctgttttgactcaacacaagtgccaaacttaacttcctactagttaagacactgtccctatacctctttctgtggctgtggagttaattgcatttgtgtgtggcaaatccactttttctttctttctttcttttttttttttaacctcaccatttatttgaatttctacaaaagccgtatgtagttcagtgacctttgcattcacaggtaaaggatagggagattcttcagtttgtgtgcagatacagaatatatgtgtgtaagacagatggaaagcctgatgaaggtttgggttcaacccccccttgtcttttcttctagaactctggttgtctcttcaatgtctcttctttgtaccatgggttccatgatgattcgtgtgtgggtgttttctgatagggaacttcttaagttgtgaacagtttgttgggagcctgacataaccatggccaccaacatgtggcccacattcaagatgtgtggttggtgaatttccttggcctctaactgagaataggttcctagaaatgacctcaggtctgtttcatttctttttttgttttgttttgtgtactgtttgaattttagagtaactcttaaaatcaagttctcctagctgataaactccatctcttattagaatgaaaaatccactactcccgtttcaaagtccagtactcctactccacgaaccgatgcacctacccctggcagtaactctactcccggattgaggcctgtacctggaaaaccaccaggtgtggaccccttaggttagtaaggggggaaatgttgtatatttatttatacttctgtttttaaaatattttaagtgactaaagtaatacaatctgttaaaaaatagtgatggccagtgctgactgttagatgaggtaagtattccaaaccaagcatgtggtcccacccatgtctatcctgtgttaaactgttcagaaaaatgggatggattattgaaccatgctaaagacttgaatgattttgagaatagtaaaatgagttcatttgagttatgggttgtattattaacccaatgaacaatgtgctactacagttttctgtgttcttgattttctcttcagcatccagcttgaggaccccaatggctgtaccttgtccatatccaaccccctttgggattgtgccccatgctgggatgaatggggagctgaccagccctggagctgcctatgctgggctgcacaacatctccccccagatgagtgcagctgctgcagcagccgctgctgcagcagcctatgggagatcacctgtggtatgtttacctgcttttatagattagagttggggagcacacagcattgtcttgcattctttttaatgtagtttatataatacaaggtatttatcaaataatctgagtatctctttataaattaagatacatggatcatgtcttgattagtttctttgggaacatgagaaagtttatgacttcttaaaatatagttgtcattttgacatcttacactataaaattggaccacaagtcgaataaatatggtaaagctttttttctgtaataagcttcaataaacagtagtataattttcttgtattctccagtcctaataaatgaccattaaatcctaagcatcctgttatttttatcaataagttcgtctataaatatctctaaaatcttattttcaaatgatctattttcctaggcttcaggtgccctattgtacaaggtatagtaagtgtgaatctgttttgttttgttttgcatccaattttaggtgggatttgatccacaccatcatatgcgtgtgtccgcaatacctccaaacttgacaggcattccaggaggaaaaccgtgagtatcttttgcccctttgaattcattctgccgagctctagtccttgattgacttttggaatttgggtattgttgaatagggcttcatagtatttttcattttctcttagccaaagacaaggcataaggtggagtttggtgtttgcagtttaaaatcaagccttcatatgaaaatgtaagttgtgaaggcagctctggcagtcagggcttctgattttaaggcagttgttcagaaagtgtgatgtttatatgcaaacttagatgattagaatttgaacatgtatagagcagacacgctaagcttcaaaaaaaatcaggacagtcttctgctgagttctatttccagaaaaggtagtttgctcatttggcttctttactgtgagctgagcatttggaatgtctgttcacactcctgtggagcgataacagaccaagtacaacacacctcttttagcctctttttctatattcaaatcttaccacatccctttccacagtcttggtttcagtatatttacactccttttttttttaattcctcaccacctaaacacagttctaattagatcggtcttcaaagaaaactttttaaagtatttagctcctgatacaaagaaaggaaggaaggaaggaaccctgacttttcttctttcttaggaaacacccttgcacaaacaaacacatgagtctttcattgatatctttcatgacactacctaccatgcatatgctacatccttagtcttgagtatccaggcatgactgagtagccactgaagactccctctcccagaggctctcctggctgcttgtctgtctagtatttattctcactgatcctcctcttttaacattttcaatgactcacagtctcactttaggtctctgttagatgccctcttaacagagcattctaccataagtctgtctttaaataacatcctccctggcattttcttctaatttttttgagatagaattttactgtgtaccccaagctggtcttcaatttgttgatcctgctgcatttgcctcctaaatgctgggctggtagtagagaggggcaccatcatgcgcagcttttgaatgcttactcgtaaccattgtcttaacttaaatataagctctataaaagcagaacagaacaagttggctttttgttttgtgttgttttgcttttactataatattcagaagtgcattgattcacaattgtttgattgagaaatcccagttggtgtaagttgaccatatctgatgctggcttttttttttttttttttttttaatgcaagttattttgatcatattcttgccccaccccaactccttccagagccttcctactcatccaacttcatgttctttctttctcaatcaaacaaaacaaaccaaaaaaaagcatacacacacataaatatggattcagtattatgttggccaattactcctgagcatatggcctgccccgtagaataatacattcagttacactccattgaagattttctctctcttaacagctatcacttgtaaatagcttgttgcttaattgtgggtctcagtgcccacttgcccttttctgtgctgaattttatctggcttgaacttttgcgggtcttgtgcatgttacagtagctactctgagttcatatgtgcatcagctgttgcaccagaaaatgctgttcccttggaatcatctactatctctggcttttagaacttaccacctcctctaccacatggatccctgatctttgaggggagaggtgtgatacagacatcacattaaggactgagcaccccaaagtctttcactctgtatattgttcagttgtgggtctctatgttaatcaccacctgcaagacacagcttctctgataaaggctgagccatgcactgatgagtgtctatgggtgtagcagtatgtcattaagagttgttttattgctaggttcatttagcaaaataaccagtagggtttcccctaaggcccatgacctatctatctagcctaaggccttgtcagcaatgtcaggtatgagttccatctcatgaagtgtgaaccttaaccttttaataagaaagtagttagatacttttcataagattgtgtctattgtatcagtgagtgtatttttcaggcagatcactattatagctcaaagcgttcctagagaaatgagattgtagcatgtagagtgccttccagcattatgaacactaatcagtaggagatgaagcttctacttgagcaccagctcaatttttacatattcagtgacaggttgtggagggtaactaataacattgacaatagccagtgggtagggttggttatgcaatgccttcagtcaaaaagttgtaacacatttctggtactggatgttttgtttggtagcatatgatgtctatctggaatatttactattttgtggttaactccatttaaattccttttatatatacattccctcaccatattcccttttctgcccttccctcccatttaatcctcctattctagtttctccgttatccctttataacactattctgcttcaccttccttggaaggctcttagtcacttagttacctaacctctagatattttgaataaaacacagtcatctaaaacttaaaaggatgatcgtttctagttccatccatttacttgcagatttcatattttcattttttcaatagctaaagaaatattctattgcataaatatatcatgttttcattatccattcattcattgatgggcatctaggctgttccactttctggcagttaatgaatagatcctggatgaaaatggatgagcaagtatttctgtaataagatcaagaatcatttttttgagaaacccccatactgattttccacagtggttgtatcagttagcacccccaccaataatgaacattcagttaaagaagtaactgaatattccatctcttcaggcccctgtcataattttattgtagaacagagttacacattttagagcactggtggtagcattgtctttaatcctagcactctgaaggcagaggcagaggcagtcatatctcttagttcaaggccagccaggtctacagagaaacactgtctcaaaaggaaaggagagatgggagggagggagggaaacttcaatgccttaaacagtgcttagatcacagttgatggtcacaatgtcagtttgttcaaagagtaaataaatgtatgttgatttcttccttctctaacttccgtttgcttgttaattcagtattacataggtacttgctgttgccttagtgtctctttgtgttctttttctgcccatttcacctgctcatcagtgttaaacacacctgttgaccttacctttgtttttgtcttctatctactgaataaaactcaaggttcttccttttataactaactttactacagactttaacccaaatgtcccagttgcatcaagcagtgctggctctatagccaagttgttcagtaaatatttggctgattaataagggaaacaaggcaaattagactttgaattcctggagagttgaagacataaatatcaattaccataaaattctgtgtacctgtgtaggctctgcaaatagtggttgactaacaagttttattggctaagaactctgaaggtgaaagataggtctgtttcaagcagtgactaaataacaaggtcatgggattaatcaaatcacaactcagatgcctctgagttctatatgaactgagatgagatggaagggctcctttagagaagagatacaatctttttttcaggtgctgttactaacagttaccacgtaggtagtaaagtgggtaagttgagggttcctgctgcaggtcagccttgaagctacaggaattgtggcttcagaataattgtgtttggaatacttagcatttgctaccttggtcctaagggtcatggcagttagaccactatatagaattacaactgtttggctcaccgtgcttctgagccttgtgctcagttctcttccttcagtcttgaccagaagtttccactaccgccctgagtggagagctgccatgctttccccagaagcctgaactcaaacctagctttcctaataataaatagactagagaatactttttccagtccttcatgtagttaggctccaggtcacatggagtcaccctttcctctgtacccccttaagaagggtccctttcatttttctcataagcctacaagccaccattttgactctgtttcttgattaccatcctttgcagtttcaaaaaaaaaaaaaaaaaaaaaaactgcttctttcaggcttccactatttgaatctacccctggtggctttgtttccaggatcatatccattgaaagtctaccttagtcaagtttcatctacctgtattaaaatctctcattatcaccctaaatgtggcttccatagtccgagcatcctatccagtgtagccttaatctgccttcccaagccaggtcctatgaattgcagctcctgcatccagcattccaccatccacacacagtcctcataagttcactcttctgaagtcacaattcctgtggctcgaagtcctctttatttgactcagaaaataccctctgtctactgacttctcagcttcccaacccttcactcaagcggttgtggtgtgctctcaatgatgggctagctttttgtaaacatgaccagcttaaacttttacgttaaggaactataaactattgattttagttacttttttgttgctgtaatgaaaaacaacagtaaaagcagaaagaaggtatttattttggcttatgagtccaaaggacttagagtccattgtagcaaggaagcagcaagagactggtatggtagctggagctggtagctaagaacacacatcttcaaatgcaagcaggaaacagagagcaaactgtagtgtcaggaggcttttaatctcaaagccctccatacttcttcctgcaagggtatatcacccaaagcttcctaaagccaccaactgggtaacagaagtattcaaatgcctgagaacttgagggcatttctcattcaaaccaaagtctcagctttgactcttaccctgcacatgtatatgtcttttatatacccacaaatgccttttcttggtatggagcatatttctcaaaaagggctgtggtcagaaagagctgtcatgataggcttagtttcttcccacctgctattgctgtctgattctcctaaagttgaccttcatcccagcagcctcactgttcccttgctaactgttgtgtcctaaaagtagaatctgttgatgaagactctagctccagtttaaaaccaaatgttttcataccactgggcttttaagggtgtgaattggaaatgaaagtgctgtgtacaagtaaggtgggccttggagctgtcaggcaggacactttttcaagttctcattccttttggattttttagaatttgtgattttttagtctgatcaatatgttaaaactatttttggcatatctgtcaactcaacattttcacctacagaatgaattctgcagagcatcataattttagcttagtcatctccattaataactgatttggttggagtgaatccatctataggtaaaaatctgttgcaggccatggaaccactgaaaaatacaaagcaataaaggaaatatttgatgttagatatcccactcagttctctgtaagctatagactcatcctccttttttttttttttttttgcatatctcaagtaacactgaaaggattttctttctcttgttgtattgaatggtttaataacatttttaaggaatgtagcttagttggtagaacgtgtttctagtattcatgaaacctggggtttgatatccgtcactgcttaaaccagacatgttagtgcatacctgcaatcatagcacatgggaagtagagacaggcaggtcgccatccattatatactgaatttgaggccaaaactagggatacataagcgcctgtctcaaaaaaaataaaaataaaaaaccaagcaaaggtaatgctttctacattatccttctgctgtttttccttcctgtactctagagcatactcctttcacgttagtgctgatggccagatgcagcctgtcccatttccccctgatgccctcattggacctgggatcccccgacatgctcgacagatcaacaccctcaaccatggggaggtggtgtgtgcagtgaccatcagcaaccccacaaggcacgtgtacacaggtggcaagggctgtgtaaaggtctgggacatcagccaccctggcaacaagagcccagtctctcaactagattgcctggtaagtaagaagggatgacaaataaagactctgatggtaaaagaactataacagtcccaagaagataggtaggcagttttctcttagagtggtctagttcttaatgggtgctatgtgcacctgtacaatctacattcactctgtccccagagtcaaaggtaaatcacttgggtcaagaattctttctacccaagagttcacacattctttctacccaagcattcctgagaacttttttttttctttctttcttttttttttaatttaaattagaaacaagcttgttttacctgtcaatcccagttccctctccctcccctcctcccctacttcccattgaccccctatcccattccctttctgctcaccagggaggttgaggccttccatgggagctcttcaaagaatgaaaactttcataagtcaattgctcacatggcttccaagctccttagctggtctgttaacgatttgtccttgggttgcacaggacattacagcttaattttcttcccttgtatcagaagaatcttttagtgcatcatttaatctaacataattaagtgtatataatatttccataatgaacaaggaaacattttcttttcctgtcatgcctcctgttgatggcacttcattgaacccacaatgcctgttattcgtatataggccaaagtgtcaactgccaagtaactttaactgatgtggtttcaataccagaaccctttgtcctcagcaaaattatgccagggcttcagagcttggagaattgtaatgatttgtttgtagatccatgtgatctgtgtatgcagattatattcatggttgcatattttggtggtgggagtgggactagatctttgcatttgggtgctaattaagattaaatatcttggcactaaatttttgtagatcaagtttaagtacttccttaatttcatgtaattttgtagcattaatctactttatcattgtcataagtataaatggctcattaaaccagaagggaacacaatacagttatggattcctgctctcatgttaatgctgttttctttcctcatgaatattttgtgatggcttttgtctccatagaacagggataactacatccgttcctgcagattgctccctgatggtcgcaccttaattgttggaggggaagctagtacactgtccatctgggacctggcagctccaaccccacgtatcaaggcagagctgacgtcttcagcccctgcctgctatgctttggctatcagccctgactccaaggtctgcttctcatgctgtagtgatggcaacatcgcagtgtgggatctgcacaaccagactctggtgaggtaggtctgctggtctgctgaatctacttcttggttgtaagggagagctaatttaccacctggtgctttgtgtctgtctgtctgtctgactgtgtgtatatgtttgtgtgtttgtctgtgtctgggtagagtacagctttcttttaaaaaagttatgaaccagttacattttaaagataacaaattttaaatgtaaatcttgcttccctactatattttattacatgaatgtttcattttacatacatatacacaatattatttagattttttagaaggtcatttttacatattgaatgttgtcaggacatcatgggttcattaggtgtctgtaatttgttagctgtgcctgctgacacccgtcatcgcccctagctccttggtgagaaccatatagttctaggttagttgttgcatatgtcacaacttcatgagtagttgtatggcccttggcaagagtccagtgctcatgggttgttgcttatgctcacatgacctaaattgtctgttctcatatttaagaacaagtggacagtttggttatagattgagaaacgagaatgagcattataaatagggaaaggatatgagaagattgggactttagctatgagacggggcgggggggcatgtatgggaagaaaagagtcctttgtgatttatcttgaagggtttcacactaatttaattttcaaaaacgaaataattattgttcttgtgcccttagggtaaggttcagatattcaaggtcatcctcaactaagtgctaaggacccactttgaactcctccttccatgccccatgtacattttaccagaagtgatcctgggcattggagcacactgagtgtacttgcattgggtgttttttgtgagcatgtcctttccctcctgcacagccagacatggatacattaaatgttttgctattattttgaataattagaaagtataaaccaaatgagatctattgataatgcctgcactgaatttgatcagcagagagttcccaattgaattaaaataaaaactaacttttcaagggctttccctccattttacaatttcaggcaattccagggccacacagatggagctagttgtattgacatttctaatgatggtaccaagctctggacaggcggtttggacaacactgtgaggtcctgggacctgcgtgaagggcggcagctgcaacagcatgacttcacctctcaggtgtggactgtgtggggggtaacataacctaccgaaagaaaaaatggtgtgcttgaacttgactctcttgggaatcatctcttcaacttggttcttgcagtacattgcagattttgttgatgtcctctagatttaagagcataactcctgtcctctgcagctaccatcatttgttttaattccagatcttttctttgggctattgcccaactggagagtggcttgcagtggggatggagaatagcaatgtggaagtgttacatgtcaccaagccagacaagtaccagttgcatcttcatgagagctgtgtgctgtcactcaagtttgcccactgtggtaagcaaagtcccttttgttcagtttcctatcaaccagaatgattgtttggttcttctgttgactccttccaagttgagttttttattttgtttatgtgcctccttacaactatatagcttacttaaccatgcatgcttccctaacaagctacgtaaattgctagccttaatccacattattccttatcattaacaatcagtgactcatgaaatccagaaggagggtgtgctttacttttgaaaggaaaagacattcttatttgttataaatggaatgtctccattaattcagcattctgtgaagcaaatgacaaagtaacacaaaatcctcttcctgtaggcaaatggtttgtaagcactggaaaggacaaccttctaaatgcttggaggacaccttatggggccagcatattccaggtaatatctagctcgctgagtgactatgtgttgtgtactacctgtcctggtttatctttgccatccatcttcatgcatcctgtgtgtacatacttacatgtcctgaatttatgtcaggcatctgatagataccattactgttgggcagagcaagaacctgccagaagcaggaaggaggattagtttgcacagccacaagctaaagcactagggtcttctgctgcgttttctgagcctagtgtctcagcaaatcctgaattagccatgactcaatcctcttttatatttcttgtgggggttttgagtcttctgtgacttttttgtgcttatgtatactatatatttttttattttaaatattgagtattttgtttaaataacttcatgagtactatcagttttttttccccagttcttactcactttcttttattattgattatttttcctgagaatgttccagaaaaggtctctcaaactgattaattttatgaacttgttcttcttagtagatcagtagaatcttgtgtagttggatatttgtaaaaacaccagatttagacacggtccaaatacagacatgcacacaaaaatctctgttgcaactattgaactcttacatgtttttatgttttattttagtagtgttgatcatttttaccagtgtctttcattacttgataggacctgtgctgtgcctgctgctctatttcactacctagatccaggccacctggcagtggcagttgagaacttctcagatcttgaatgctctactctatactttctagagaagaattttttgttgttgttatttttgtttgtttttaattttcttttatttaatgtgtgttttgtctgcctgcatgcatggctgtggaccatgttgcaacatgcctggtgcccatggaaagcagaagagggtgttagaaccccaagaacaggagttactgacaattgtaaacttccatgggggaactgggaattgaatccaggtcctctggaagatcatccagtgctcttaaccactgagctgtctctccagccctaggaatagaatttaaaacagggcacttgcttcattgtcagggcactaggactgctgagttacctgtctctttgatgcctcatggcaagaaccagtaggctaagctagggatgagcatgagcactcaagaggattgactttagcactgccgtgtttaggaaagttggggcttccctatgcctgaagagcttctgggtgctccatggagcttgttgcctatgcatctcctccatatccaccaatcttgcttcttagcacctgtatgtgacattcttgatatgtttcttccctagtccaaagaatcctcatcggtgcttagctgtgacatctctgtggatgacaagtatattgtcactggctctggggacaagaaggctacggtttatgaagttatttattaaggacaaatcttcgtgcaaactggactcctccttgtagcactttgcgctgttgtattttttttttttcatatctcacccccacccccaccctgccacaaaaccgaggatttccaatactcattgcagttgtggagtttaatccctttccatagccccacttcttccttgctattgaattgtgaatactcatttaagaacctgtgataccaaatcttcagctatcgacttggaagaacatggaatacctaacagtgaatggaatctttaattatgtattatatctgtaatatatttattttgtttaaagaaggctttctaacaatgactgactaaataaagctgtccgctcctgcattgataatgaaggtgcattgtatttgatgctctaccccctcacttttggtaagggaggggaaaggaaggtttaaaataactgatttaaaatgtcactaaatgtagactattgactgtatagagacatgaaatgtataattacacatggaagcaatatgttgctgtattgttatgaggttattttgttttcatatattaaaaacatttggaaatttggctgaacaagtagaatatgataggccaagtactattcctttgagtctatttgggcaactttaaccaatatgtctataactttagattatattaaaaataattgaatatttttcttttttttttacttgttgacaagtatctttgtaatatgtttttaattcccctttttattgtattataggcagataaacaaattaaattgggcctcaaagagagaacttaatttcttctaaatattgttgccaaatttactggcagagggagctgtgtgtctctgggcagttgtgttgctgtgagacgtggcaggctattttgtggcatgctctttaggagctgcaggtgcaggagtgctgcctgcctaccgctgtgcagggcaagtctttcacaaaaagaggccaacagaggaggcattacagagcccaccctctgaaagccacaaaaaagaggctctcctggatgatgacttgctttctttacctctggttctttccatgtcttagttggatgtccctgaaatggacacaggctgtgccattgtgccagaaacattgtgttatcttttatgttgttgttgttgctgttaaactataacatgtgactttttttattattattttttgtttgaatgctttaaaaagatcttttaagtctgtggatctgctgatgtacagtgcctttgctgctatggatcaaaatcaaaagaactgtgtagataaactttattgtataagtagaaaatcacttaatttcatactagaaatggatggatgctgcaagttgaaatggactgtcattgacgttcttcgtgtggtagcaaaaacaaatggagtcttaagtgcttagtgtttgatgtcattaacagtttcataaaactctacagtgtagaaagattttgatactaaactgtgcattgtacatagttctaacgcattgtattggctgccagtacttctatgatggtagattgtttgtgcattcagacttttaagcattaaacataaataacttctagaatgcttatttttctaattttttttactaatttctttgtctatgccactccctatattaaaagtcattagttccattcaagtcagattgttaagtagtatgggttttgaattgttgctaatttatttttcccttctcctagaaggcatgaaagaaggatggaaggcaggcggttaccaaatagttactgagttcctcctcattttgttaaaatgcttcatccagaagttgtctatcattttcaaaacttgaacagtttagagttgtactgccattctagtacactagttgtgtgccactatttaaacttaactcttaaaactaattaatattagaagtcttctttgccagtaacattaattgcatttaagtgcttagtatcccatggaggctaacagctattgtactagtccttgcagatttctgtagtgtttcccgcacagctaacacagcattcaaaatttgacaaatcagagaccgttgccaactgttgggatttgaggaatctccaaaacacagaagcttctgaaagtatcttgggttggatgttcttgtgaagactctgttgaggcaggacctaaaagagcccaggttgatttgggcacacccaggtattctgcagtgatcagccaaaggagacccagctaggtcctgcgtgagtgcattccatccttgctcaccggtgtagaccaaagcaacaagtccaatgagttgccatgagctagttacatcacaggatggtatgcaaatccattgaggctgctgagaaatgacatcctggaaaacaccaagtgaccctccacagagacaactctaagcagggtggcactgcttttgttgggcatggaaggaagagtgctggccatttgccaggccttgagctgttctttcattgtgttagttacttgtcagtatgatcctgagaatgtagacagtcgaaagggaaaaccaagtctacacatcagaaaacacagcttcttaaaaagataaggtgacagtagtggctccattctgacagcaggcacatgaggcagagacttactcacatggtactgattgggaagcacagatcatagactggaaccagcaacagtctaactttcaaagaccctcccttagtgactttggactgctagacctcactcttcaatgttccattgcctccccagataattctaccagctggggaataagttcttaaagcaagagcctgtgggtaacattccagataaagccgtaagttatttgctgaattgtgtatggagggcagtatctacttaaattcgaggcctggcttcttcatgtgcacataagtttagccataaatgtcaaactatagtggtaatttttaggggctggcaatatggctctgtggtagggtaagtactgaccatcagacctctatcaccaagaggtgatgagttgttgactttaccgtagaattgctctgtgtatgcttcttccagagtctgaagaataataaagatccatctccccacagcagagaaaacttagttctagtggaagatggagtagtagagaagactgactgaagcataaccatgaaaactaaaaggaaagctagatcaaagcagccacaacgaccttcctaagattggtgggtctagtgagagtgacagacatcaagatgttaaatcctcacacctccctttgagttgatacttggcaaaatggcttcatgggatgatttacctggaatgttttgtatgtgtctgcaacacttgaaagtattggaaattaaactcttcaaattatgtacaatcaaaaacttcttggcaaccaggaacaagggagattgttcttagtcagaagatggcattctggacagatgtgatataaatgccaacctgaccatcagccagggggttgactgctttgggggtgcctcagtttcctgaaacttgggcttgactatttgttgcttcatttctgacagtagtaagaaaattggttctgtgattcattgtccaacattgagtaagcaattatgaaattaaaaagtcagtccaaacaggtaataattattcagcttggtgctgatatgcatatctgaagctacttcattgcggagaaatataagtgtttcaatttgtaacctggatcctgccacctctcaccttcttctgaaggcatttgctgtagagcaacagccggcagctttctctggtcttttgagctaattgcatttattcattttgtgggttccagccataaattgacaatgggagtggcttgctttcaatgacctgaacacagcagagagcattttatgaaagtgtttgaacaatatggaaccaccggctgaacttttctttgctaaactgttagttttctgttcagttttcattggctgtttgacagtcactgtaaaggatgtgatgtacctcccagttagtttgcaggatagctggacttgcccttctaaggtgcagaattctcagctgggaccttcatattttgcctcaaagaataataattcccatgggactgaccttagtctagaggacttatgagcacaggggccatatttaatctcacagcaggtccagaaaggatatggggattggggaatgctacaatcctgtttacacaaaagaaagttaaggatccaaagggagaagaaatgtatcacaactccactgggagtttagagaaaacaactgacttggaaccttggcttcctggtttgcaattcagtttggaatcatcccgtgcacaaccgaactgtaggggatatgagaaggaacattcatggtgcttcctcctaattgtacattgccctatttcacccaagtcatgcaacttgaaagcttggatcaacagcagattgcctgtgcaataggcaactttgcataggttaaatgttctgctatctcctggggaacacttggccatgagttgagctaggattgtttatttttcttccttgggaagcctcaaagttctagaactgagttagtggtgggatggagagacctgtgatacttgtgacctgccccatcataggctagtagaacttgagccaggagagatttccctcaggaaataaggaccagagggagatgccagaactagtgtcttgcaaacagaattgtcccttaggttataacttctgagaactacaaatacctctatcccaggatagtttatcttaatacagacaagccaggtacaactgtgacaaaagtacattccctagaagctcgggggtccttccccaataaagcaaagttttaggcgattcattgaagaaatcagctcttcaagtttattgttaaatatccatcatgtacataatttttcatatttcctctaaggagacagtcatggtaatgaaatctgatttccatgtttatggctgagtcagaaaaattagttattgtttccacagtgatagtcaattcctcaccttcacaccaattttttggcaccaggggttgtgtgaacaagaatatttctctgagcacacgttccctggctctattctgagcaatgctgtctactaccatgcactagttccccagtgagtgttagtgggagcttgtgtgatcaagagtgaaaggattttgctgcagcccacaaagggtgggttaccatgctgggtcacctttacctgcacatgagagcctctctgaggcggcctgagcttagcagacacttgatttgtgtgcagtctgagcttagagaggaaactattaaccccactccacctaggcatctttggactcaggtacatttccacttcacaacacttttgtgttcttgtgtttgtttaaatgttattaccacctccacccacaccctcacagccaccacagaagtctgcaaaaacacaaggtacaaagtgaaaggagcatagttggcacaggtcacacaaagaccaagttctcagcactagcgaaatgtatttaccccagagggacaaaggagatgagagacaaaggagagtagagaaggatacaagtgagagggagaagggatatttgccccaggacagaggactgcctctggtaagagaggagacagacatggccccatagtcaaatggcagttcatacagggaaggggaaatcccatgtcaggatgagttggtgaattttgattgaatgggtttggtcagtatagtgtttttatgactggaccttggtcagccttaggaggaagaaggcaccaaataagggaatagaattggtggctggctttaggaatgtaactaacactttagcaatgaagagaacaagatctgccagagccatgtttaccatgccccggcctactagagccctgcattctcacatttttgttttattatcacccttaggtgattggtacacagacgttgttctggttccttcttgctaacactggggcattgttgatggggacccaaggacgctgggttgctggccaatgccaggaaaagcagactgttttacttgttttccaggcaatgcaggaccatctgaggctagggaagggcagtgtgtaaggctgggctatgatatagattccaaggaaacagccaggactggtgggttgctggagcagtctgcatttgatttgacatctattgggacagatggaatagaaacaaaggtaaagttaaggtgtttcagggaaattttttttatcttggatgcacatttaaaactttcaggcccgtggtcctagtcgtggcggagggggcgtcaagaccagggtaagaggaaaagagtccaccctcaggaagaggtggaataggcaggtggggaaacaggctattggttgacaggaatacttctccagattgcgtttgacctgtgacaagcttattcaagttgatttcctgaagcttaaaagaattacatatgttagcattactactgtttataatctgaaatgaaatttataatgtagaaagggaagtagagttatgattttcagtcctacataataagtttggggatccacacaatagcatagagagaaggaaagaaatctgaaatatttctcctttatttaatgcaccttaaatcactcttatacccttataaattgcacttagacatgttaattgccatattcaacatatctgaaaagtgtagagggccaagtatgtctaacctgaacaaactgcttgttttagctgttttagtcttaattttgaaagcatatataggaggctaaataaagcttataactaattaattgcattagtacttagcacgactacaagtatatttctaaacacattaaagaatttgatcatttataaggtgactgactattagcttatatcttttaattatctgttttgttttgctttaattatccttgacagtttacaataagttagtagtttttataagattaggactttatattttttatacctgttaggtttagccttaaaaaatagcagttttttaactgaagctcttttaggatcaaaataaaattttaatcataaacatagtccatgtggaaattaggaacttttctgaacattttataatgtatcaattatagactatcacagtttttatatgacttagtttatggaataattagctaaaacagacaaatatgactgttagcctgagtagactttaggaatttctaaaccttatttattaaacagatgttatcaaagtttcttagaagcctagtgctaaatgcttaacaaaggcataagtagttaggtgtaaatctcttaagtaagcttttgttaaaatctaagtagacctctattaccttaaaatttcataattgtatatgacatattctaagccagggttgaatcatatatatagtatgttgtagtaaatataatcttaaatttttatcaccatacaaaaatccataccaatccaaattattttggagacttgttgttgcttccttattctaatacaatgcaataataaacagagagttcagtagtactgagaagttttataattgttggtttataccatgtggttatctcaggatggtgaagtcacatggcatatactctttaaccttagtaaagatggctgccagtcatgtggttgcttccatcctaatgaggtcatcaaccaagatggaggagagccacatgactactactttaacattttttttcttagacaagagttgaatctaagtaacatacgcagtatattttagacatgagttgaatcatatatacccatgtgtagattttaattatggacctttagatataaatttaaagccaaattttgttacagattttataaatattaaaccatacacaatgaacttatatatcttcagacaaagtatatacataatcttaagagttttttttagagcaacgtgtagagaaatcagttataaaatatttttaagagtgagaagtagagccttagagatgagatttttggaagtatagagcagagcaagtttagatatgagatttggggaccatttgtgcagtggcagaagttgctttggtttgtgagaatttggaaatcaagtgcattaatttctggccattggtctgtactgaggccaaaccttgagtctgaagaggagagagggtcaaaaaaccaaattccgctggagggagtttctattagctctacaagggagctaagtagccaggagattgcagaggaaaagggagctgctaagtatctttagaatgctgcccacatggtgggcaccccaaggacatagtaaacagaagaaatctggaaagagacaatagaagtaaagatgggtgtatatataaaggttaaagggaaaagatagatggactaatttaagaaaagctggttagaaataagccaagctaaggctgggcattcataagaaagaataagcctccatgtatttatttgggggttgggtcatgggcctccaaagagccaaaagtaaaaagaaccaacaatagggaaggggcaagggagactgggaagagatttttacccaggaaggacaaaggactgcctctgcatagagaggaggcagatgagactcaaaggcaaatagctctttataaagagaatattaacccagaggggcaagcaggataaggggaaactacaaacacagatatcaagaaaaagcggaggcagcaaacatgcaagcaagcgtttttttttttttttttgcaggagtgagtttttatggagaaaaatggtgagtctgtgcaagggtgagttggtaaatcctgattggacatattgctcatctgatgaattttgatggctggaaattggtgtttagtctcaggaatgagtcagtggccaaataagggagtagaccttgatgctagctttaggaatgtaatctaacagaaagagggaatgcgggaggacaagacctgctagagccatgtttgccatgttcaggcctaccagagcccttcacagaggatggtattattgtaccttattacatcctattagatgtgtaaagctaatataagtttataacccaatcacagacctacagatataaataaaataaggcaaatgtattgcttatattcctggaggtttctttaatttttttaaagtcctgttttaagtgtgagtgtttcgttgtatcttttacctcaggcttctagcccttgccagaagtgaaaaattccatggcattaaattttccgaataattggtatttactccttgaaaaaccaaagcttgaccttttgctccccccaaaaaaagtccagttgtactcaactgaactgtcttctgcctttaattccctttaaaagaccttgtccccttatcagaaagccaaagtaacatttacctgattttgaattgtgtgcctatgctgttgttactatttccagtactagtaaggagggtatagcaaccaagcaaataacaaaattgagtgaagtatttgcaatatatatgatagaagatcttaaaatgttttacatgtaaatagcttttgcaaatcaattagaaaatgctccagtagagaattgagcaaaggatgcaaagggaggcaaaaggagaattctttcagaatttgtcactaaacacaaactcaagaaagtatttttttcacatctaaaccgagagggaaatgtttcacttttaaaaggaatgaatattagacattcctaagtactctggatgagagttaaaatggataaaactctgaaaaacttctgggagggtatttcaatcccaagaatgtacatgagctttgatgcagcaatgtggtttctctttgtcttaatgtatttgagggtataagcagtcaaaggtggattttgttgtggttggttggttggtttttctctgctttttgagatagggtctattgaagacagggtttttgatgttgttgttttgttttgttttttgttttgtttttcaagacagggttattcagccgcagccctggctagtctggaactcacagagtttctcctacctcttcttctagaatgctggcattaaagtgttgtgtaaccacacccatcaaagatttttagaaaaagaataatttggtttaaaaaattgaaacctagttatatataatagcagttaggcctgacattatagggttttgaagaactgagctacaagagtgcagggctataagttcaggaacaactgaaacaggggtttgagtataactaatcttacttatcccacttttcttatctactgctctcacagaattctttcattaagacagattgcctaatcctagtggtgtgaaacattgggttagtgaacagtatcagcaaaaagagaggttgactcacaaactttctcagttctagttcaaaacaaactccacaaaaagattgaaggtggtgattgtttaggtcaccaaaaagttttaggatcaaatgcctaaacctggattcatatgttaatggcatttgaagaatcaagcttcctgccatagaccttaaatcccagttactctcaagaatggaagcaggaagatccaatcataagttcaaggcctacctggcctagaaggtgatgagttcaagatcagcccgaacaatttagtgagagcctgtctaaaactaaaaagtgaaaagaagttgggactatacctcagtgacagaacatttacgtaacttttatgggactcaatccccagtaccaataaagaatataaagatctctggaagtagggccttagaaaaataattaggattagctgaagtcatatgggtaagatccctgtaatggtttctgtggctttataagaggaagggagattcgggttagcagctggctttatcttgccttgtggtgccctctcccaagttatgctacagaagaaggccctcccaaatgccagcatcatgcctttagattttccagacctagtttccaaagacaaataagcctggattgtttataaattgcctgatctttgttatggcaaaagaaaatggactaaggcagccacggatggacagtaattacactatggtggtgatgatggtccagtcttggctcaggtgcacacttcaaatgaactgagagtggccagtgtgatgaggaaagcatagtcatgcagtcaaccaggaagagagggttatagcaaaacgttttatcccctcccccactacacacacacacacacacacacacacacacacacacacacacgattagccaattgctaaatgaagtttgtctctaaaatgtggaagaaataggcgataggaaacagtgataagaaacatgggatggacagcagatatccatgggtgactggaagtactgacataagaaaaggacttggtaggcaggcatgtcactgaagctaccacaaggcgctttcctgggcagacttaacctgcatgagaatgaaagggggacactattatttttcaccttcctgcaatatgcctgatactagggaatgtgcctgttagtatatggtcacctaaataaacacacatgttctctctctctctctctctctctctctctctctctctctctctctgtgtgtgtgtgtgtgtgtgtgtgtgtgtgtgtgttctcacttatttctgatttgaactctacaagatttaggtgaacctatgtacatattggagaatgaaaaactcagcagagtttaatatctcacagccaagtagcatattgagcagcgagccagctgtcaagcccttccttcaaaatgctggttcctttgcatcattgaacccttcttaaaagtttcatttcaagatgtattgagggtacagcctgtctgacttaaccggcatttcatacaacgttctttctgcatttataaagcttgaacttgtggagcttctttttaatcccacataagtggtaaccattatatttacatatgtataaaaccactcaaaataatctataaccaaatctacgtcagacagtgtggagcctttacctaatacagtttcagctccctggggagatggctctttataaaggaggagcgagtttttccttcaatgtgggggtctttgctcagccattcattatagagttgtgacaattttcccagccactactgcactgtttattgttttactgagcatatggtatgtactaggactctgatgccactaggcctcaaagaggactaaggaggcactcattcctataccaagcctacatgtaatccccttcccccatgccccagggcctacctgtcaagtcagcccagaaacaggagagtagtgcctttttgaaatctatctctcaagagttcatctgtgcagaagtcatctgctgatgagtacagcatggaagaaagaatcgagagctttgtaaaattcaagctctgttacatctgcttcatccctctgatctactgagcctgtcactctgttttagaaggaaattagatgttctgacaagactgttcttcacaaagcaatgttgattattacctggtattctgtgatcttatgggtgtttgcaaattgatttttttttttttttatgatttgttctagtattttccaggtatgaaaatagactgactgccctgtgattttcagggcagcccctttctcagcttcaaatatagattgctctagttttaaccagtttttagtatattcactgttccctggccaatctctcaaattgcctgtgaaagacattgttagccttactttgattacctaaggacaaacactagaaggaaacaatggctgaaaatgtacagttcacttaagaaaggaaaacatgataacagaaactgtgatttatgatgtcttaccagcccacagagtccggagagcagcaacacagcctgtcactcacagctgaagcgctggacttaaacagtgtctatagtgtacagacagcctttccacacagcagagcttatctgcaaaaaatagcaagatatcagatgtttaaggatccttattcaaccgtttctgacctttggcaagcttgctttatccggtatctattttcgaagattataggataatgtacactcctgagatggaaattgacacctcctgatgagaataattgaaggcaagcttgaacccatttctccccacattaagacaagcacaacactgaattcgggacagagtgacataattaatatgaaaatggggtcagcaaacaacttagacattcgttttgtggaaaatagaaagatgacaagcctagtgcttgcacaagatatacgtacttcaggaaaaccagtgggcagctgtaagcacttccccggaagagttctgatagaaagataatgcactgggcttctttctctagcttctttcttggcactgttgtaggctccttcatacacttagcattggagtctaaaaggaatagttcagtcaagagagctttgcagctcccaggcagacagaaccatttctgaattgcagaagcacttaattctttctcactttaggtgtgaaagccacttgggcgacagcccaggcagggtattgcagactaggagtgaaaaaactcttggcctctgaaaagaaacagtaggggggaaaatattcggttaccatttactaagagaccaagaaaaaaaaaaaagaaaaaacactgcatttagaaaaacttgcttctggcaactgtacttaagactctcaaatttggaagttaaacatggggaaatgttctaaacggatcgcagcgtatttgtctatcactctctttctgaagtggcaatctgggtgactggaaagtacgaacacatctctattctggtacagcttgcagagagctgcaagttacggaacggagtgggtctgttgggctgcttcttataaatagaaggaagttggttcatgccattgagcgggagcgtctgtttgattgttttgcatgtgtgtgagggcagctagtgtgtatttgctgggacagattggctgcagtgagccagcaagtagtgacagaggaagaaagggcccagcgaatagccactctttgatgttcactgaggaggagttaggatgttcccagaggcagacatcctcacagctgcctcacacagatgtctttgggttctgtgggggaagggtggggggctccataatgacacatagccctagagctgcccatagctatcttgcagaggtggtagtcattttataagactacagactggtagaaagtttcagagcattgtattagagatatacagtgtgaggagatgatcctattcaggtaggaaaatgactttagagaagagaaaataatatagtcattaaggaaaagaagtacacaggttcttcccaatataaaaaggacaatggccttatgagcaggtcatcccactactgcatctatacccagacaaaatgaagtctgtgtcaaagaaatatttgtacatgagccaggcggtggtggcgcacgcctttagtcccagcacttgggaggcagaggcaggcggatttctgtgagttcgagaccaacctggtctacaagagctaattccaggacagcctccaaagccacagagaaaccctgtctcgaaaaaccaaaaaaaaaaaaaaaggaagaagaaagaaatatgtgtactagtcacaaaggtcaagacaggaaatggacccaaataccaccagtagatgaatagataaagataatgtaataatatgaacaattgaaaaaccagttaactcacagggtggtggtggtggtacatgcctttaatcccagcacttgggaggcagagtccgtggatctctgtagttcaagaccagcctggtctacagagtgagttccaggacagccaaggctacacagagaaaccctaccttgaaaaaccatttaaaaacaaaaaaggaagaagaataaaatgagtaacagcatttactgagtaggtcgctgcatctatcaagctctcactgaatccctccagtgacaaaattactgccatagacaatgtgccaccttgacttgtgtaggtccaccctatggtcttcactaaggggtgctgtcacctaactgtatggctctcagaacacactcttaccatgaagctacatttgactttatatagttagtgttagcggggaaaaccaaggtttaggaaaacaaagagattggcccaaatctcttcatgttgtgtatctccccagcttcattgctcagggttagggactttaccttcacttcctttgaggacaagtgcactttgaattgcaccttattgtggaggaaggaagaccaatgagccttttaggtggcttggatgctactcatagtagaggggacagcagtggctggccatctctggcagctctctggaggccatataaggtagctatgtaacaggcctgctttccagtgtaattattaggcatgtcagcctctgtgagctctttagtatccaatagcaaaacatccttctgcattcctccagggtttgttgttatgcacctttgacctggacccttggaggtcaagagcatagaatgtgtttcctgctgtctcctttgcagtctctggttcaacgtagagggacataccagagtttatcttatgcttagtgtctagataaacccgaaacatcccaatgtgttttgtggccatcactagagaaatgttccgaaactgatgaaatcagtaatagtcaatgatttctagccttctatcagttttttgtttgtttgtttgtttgtttctcaagaccttgccttttagaaaagtatcctgttgtattataaaattgttggacacagtctttcaggatcttagctcaacttgggcaaactcacccaaactctttatcctttaagtcagatcaaggacaggctcatgggactgaggaagctttcaccaagttgtgaacaaataaatagccaacaaataaataagcaaacagtaaaaaaggcaatatggtttgtaaactaattaattcaaaggagtctttcatctgatgacatctgtatatgctagaaatgtctttgttatagttggtggagacggcagatggttaatatttggttttaatgatctatttggcctcctcctgtgcaaatgatcaactgtaaatgtgatgtttgctgtctcactaccctatacctgcattgcccaactcattagtggagaggttataggaatgtaaaaacagaaggaactacaaagaagaaaatgacctgatttgctgcagaacaaacaagcaaataagcagaagggagcctatgtgtatacgtgcatgtgcatttgtgtgtgtatgtatgtatgtatttgtacgtgtgtgtgtgtgtgtgtgtgtgtgtgtctgtgtgtgtaactctatgtatatattatgaggatttcttatatatatttggaaattatttgcatgtaggtcaactatagtttttcgtgatggttttagtgcttagagatctctggacagattggtaatatcagaagtttgaattttttggcatgtggaaatagtttcaattctttctcatctattctctgccacccagtctccaaccctctctgtttttcctgcttcctctcagtctaagcaaagaccaggtcaggttggattctctagcctctctaacctcatagcttagggagctctacttatcacagagaccaagaaggatttactgaagaatacatggcatcctgtgatttgaaatgcaatgttgagtgctgggacagtaaccctaagccacaaccaagataactagcaccatgctgagttctgagaactactgcctaatctaacctttaactcaaatgtcctgaagatttaggaactgcccttgtacttatacatcaactgtcttgggaggtcataaatatttgaatggcagaagtgcttaggtaagtgaaaacacagatttgattgcaaaatcatttttgctctgatagcatggatgcaagagtcttgtgagaaccactattcccaattgtgctaagcctccattttcttatttatgtttgtggctgcattggtacttacaagtcacctaccatttggaacactacttcatggaatctgaggaacattctccattgttgttgaataatctaaattctcctaagtctgtgtctctagacctgatatgaaaagctacagcttttggtatacagatctagggttttttttttttatgaaatggtaaacgtatctattttatgtttatatggagatgaaatagtatgtaatttcatcagtgataaagttgtctagtatgtgcaatcccaacacaatatttgaacatggtatgtaagagaattttattgacaggtctagttggtactgcatcagcagactaagtcctctcaaaataacaattagaaataaaaagactccataacaatgatatttgatgaaaaaatgcctattttgacattgctatcaattgagtataaaatatgtgaaagtgttgattgcaacataattagtgttgctaaaacaaaggcaagaaaattaaattttatgagctatatttgtaaattaataggaattattttacagctatcaagcgtcactggcccatcaagcagacaagcagacatgtacaatataattaagccaagtcgttttggagaagtagctgaatatcagtcatgcaaaactacagcattaggcacaattttatttatttatttatttatttatttatttattttaattttatcatcctgaaattgtatgtttgtgggaggaagaggatagaatgtctggtacttatggctttctcagcttgtttttattttgtaaccatttatattaatgtggccatacatttttacttatctttacttctccatgtttctgccttcccttcccccattcccttcacttcctttcttcttcctatgctatatggattattttttggattctctgtctttcttctttgtctttagatcatgtgcctaaaagtgtactctctatttatgtttaaaaattaaatcaaatatatctctgagcctccctctctctcgaagaacaagatttttcattccttgtcagtgtaagaacagaactttctctttttctggcgccatgtaaaatcagaaagcttaaactgaaatctgtagctggacgtcacacatcaaggcatcagactgagtgtggaatcctgtgtttcaagcatcacagctaagcagtcctgctgcggttgggagcttgtgactggagtccagactcacctagacctggcattcatataatcctgaggtcctctttccaagcagggcctaacccctatccagtcatgggacagtttctgcttcttggaattttctacatgtccccttcgggaaattccctcaggaaagctatgcttttgcaaaaacacatccctcaggccagtgctgtgaaagcaacttctgtcgttatgggttatgggtcacaaacttcttcagagcaaggaaccaaacacaaatacttgactatctgctcggaagaatcggaacaaagaaacaagaattaaaaaaaaaaaaatcaagacattattcgatgcagtagaatttgtatgcacagagaaatatctgcttaattctggagaccaaagcagtttgggagctaagaacatggatcagctaattctgagcaattttactttgtttgtttgttttttttttttttgttgttgttgttttttgtttttcgagacagggtttctctgtggctttggaggctgtcctggaactagctcttgtaaagcaggctgctggtctcaaactcacaaagatccacctgcctctgcctcccaagtgctgggattacaggcgagggccaccaatgcctggcaattctgagcaattttaaatgtcacaggaaattccaggtttggctccacgtgcctcacagggaaggagttggacatggcaacacaggtcttcactattggccagaaagaaaaccatgacatccagctgatggagttcctggtgaatctcaggaaaattacatttgagtctgactcgagcatctgcctaccttccacatcagccacccccaaacccgtatacataacatttattgtacttggatattcacttgtccacaaaggcttgataatagtcttctaattgctgagcaataggtttggattcacataaaacagacacaatgctgtccagcagagactacaaaccagtatagacatttattcaatgaccaagaaaatatatcagtataaattacagactgtgctcagaaagcacaaatgaagagcatcaggagctcaaagaatttgaagtcttggataaagaagaagtgaagaaattgggaagattgtttttaccttctttagagaagattcagatgattttaaatataggtaacatttaaatgttgcaatacgaaagtatcttcatttcactaaccctaaggaactgagtaagtaccaaagctgaaattagattgactgtaagagggaggctgtgagttgggaaaggatagagtggactccttgaaaggctatgtcatgagttccctaggttagaaatacacatggtttctactcagtaataatacaaagagaaagaacaaatgcacatgtgtatctcaaaaacctgctgagtaaagaaagcctctacagaagtccaagcactgtctggttccatttacttaaaattctagattaggctaaactaatctatgagggatagaaaacccgaacaatgaacaatgattgtctggggtgaactgagactaaagaggaagaggtggaaagctgtctgggataatgatatctttcttgactgagttcccttagataggcagatgaagtgctagtactcattcaatggttgcttaaggtatgtgaattttactgtatgtgcattttacctccaagtaaataagcaagaagggaaagggagggaacaaggaaagaggaaagaaaggaaaaaagaagaaaaagggaggaagcaggaaagagagagacagagtgagacacacacacacagagaataccaaatattgaatttaattatacattcttgatggagttttgagggtcaaggtatactaatgtccttaacttcgaaatacatgaaaaaggctaggtggactaatgaatggaaacaggtctgaaatagtgacaataaggtcagtgttaactatttatgatctagatggtaggtatgaggtcacttcatatgcctttagatttaacaatgttttgatgatttttcttaataaaatattcagtaaaaatgagttcccatttatttaagattttctataatttatcgatcagtgtcagttatattgcctctaatttggaagacaataacttatgatatatattttttcctttgtaaattagatatttggttatgtaacttcaccaagactcactgttaggtctgtccattttcagaattctattcctgtggtaagttgtgaattatgtgtgcctcttgagcacttgaaacatgactacaaaactgagtttataattgtatttatttgttcatttgtttgtttttgctgtggtggggggacaggcttctctgtgtagaaaccccctctgttgactaggttagccacaaactcagacctgtctgcctctgcctcctaagtactgagattaagggcatacaccaccatgcctggctataacttcatttaaattttaactgaaaaactgatactcagttcacttaccggaaataagtggatgctggaaagaccacaggtatgtgtgttacagcaggggtaagtgaatttacccttttaaccataactttcctttaatttgaacataaatatttctagtggaaacaacatttgcactataattgtaaaacatacatttggaatacagtgaaaaacagtaaaatgcataatatgtttataattatgcatttatgttgataaaatatttaaaatttgggtatattgggttcagttttcaaatatgaaactgtttttattggggctgggagacggcctagaggttaagagcacttgctactcttgaaaaggaccaaagagcagggcgttggtggtgcacacctttaatcccagcactcgggaggctgaggcaggtggatctctgtgagttcaaggccagcctggtctccagagcaagtatcaggataggctccaaagctacacagaaaaaaaccaaagctgtctcaaaaaaccaaaaaaacagaaaaggaccaaaggatcactgttggttcacagcacttacatttggcagctcacatctccctgtaactccagttcctgggaatctattctcctcttctggcttgtcttagtgtacacacacacacacacacacacacacacacacacacacacacacacacacacactcaacaatttctgttggatagagttgggagttggtcagcactctttccagtgtgcaagcacaatgtccctttgagcaagtacgagtgggtgtggggtggagtggcactacactgagtcactgggaaccctccaagagcacttcttatataccaggagctacttctgtgactcagcatttattaattcataaaatccttaccacaaccctataaatgggtactattattatcccatcttacacaggagaagctgagacatagaggcacatgcacagatacttcttagcagctacaacaaagtaaaggaatttctgcaataagacattcttgaattttaaatttagtctcttggaactgtctttaaacagcttcagtttagagactcagtttctttctttcatcctttttaaatttttatttatttattttatttatgaggcagggtttctcttttcccggaactcactctgtacatcaggctggtctctaattcacagagatctacatgcctctgcctcccgagtgctgggattaaagctgcgtatcaccacctcccagtttagagattcagtgcaagccttgtgaccgactcctgagactgttcttgtcttcttaggatgctggccccagattcgggtaccacagtgctgcttgtattgtgtatcctttcctcaaactttagtgaaactagacaacggactgaaaagggtacagttctggcagagcaaaggactttttagaggggccactcatccactttattcagaatagcaggaccacctctccaaaagcccacccctcccagcggacaggcatagagcaatacaactgcttttacaacaaaggtttgaatggcagtctggaagccatcaggaatggctgactgctttatttttgttttgttttgttttgtttgtttgtttttcagaaagccacaggaaaaaaaaaaaggtgacctgtgtgctcagtaagaggctgcaaatatccttgtgcaaactttttgttttgaggaaaacacaaattggcttgtatttagaaactaaagcagagaagcaaacacaagttagccctcagaagttgttacttggttctctttggtagaaaagaagtctctgacttctgtgtcagaaaccaatgctttctccttttatgagaatgttttaaaagctgaggtcggtactgcctcttgccagtcaaaatccacacctgttccagaaggcactgcctgctctggtccgaaccctcagcatattccacgctgcaaacactggcagatccttcggggaacaggcaactataaagccaggattaattattggggcaggagatggaaaggtggaaaagcctgtacaaccagcaccaagaatgacaaatgttactcttgcattctccccaaagccagagctgtcaattacaaatacctattaggtattaatgctctaggaccacacaaggaaaatgcccaggttagttaattatcagtgccagatggtggattgtggcttgaggttgttgcatatgtacctgtgctcctcacagcgtggttggggccactactagcatcacccgaatctccttaaacaggcaaattcccaaccactctcacagccactgccccatccacaacggccaaactagataagcagcctggtgcccatcagtggaaaattgataaggaaaggaagccagccacagacagatgagaactttgtgagctcacatctttgtggaatctaaacaagctgattagtagtagtcgagagtagggttgtagtccacagcagaggtcagagaggccgagtgctggggacgtgctgttaaattgcaggcagagccctgctgtatagcccagcttcctggagttcagaatattgtgcatatttcaaaattgctaagatgagattttaaatgttgtcaacagcaaatcaataagctaggctgttagttcctttggtctaatcattttacagtataaacactgtgccctataagtatacactttttttttttgtcaattaaaagccaaaatacatacttttttggggcggggggcaatggttcgagtcagggtttctctgtggctttggaggctgtcctggaactagctcttgtagatcaggctgctctcgaactcaaagtaatctgcctgcttgcctctgcctatcaagtgctgagattaaaggcatgcgccaccactgcccggccaaaatgcctacattttaacaagaacccaagtctactgctctccaaccttttttatggagacagggaacaagataccatttccttttcttggtcatcttttaagattcctctagtccattcttaaagtgatttacttgctcaatggcctatggcagctaaatccagtctctgtaggcctgaatcctgtcttctgaacttgtaacctttcatatcagaggctgacaagtgtgggcgccacacccagtccacgcatctcttttgagatccactgacctggatgatacctctccagtgccctggacttctgacccacaaaggcccttgaggctgcctggaactcagactcctcccagcccagccctactcaaggaaccacgagtcagccagaagtcacctctctgtccaaactggtccagaagttactactcacatgttccactgcccccttcagctgaactgaatcaggcaaagctttagtctctacagctcacccccatcccgtttatttttaaatcaagatggcaaattccaaggacttactttaccccctgtgtactgctttagttcaagaaactcacagttcccaccagcatgttgatattatggagttaaagcaagtttgttttcacatctctcttccaagtttataatctgggtttataattttctgctaaaaggcaaggttgccgaatttggctggtcagagcacatttggagtccatcatattttaatttatggataaacacaaggagactgtctctctcctggatgtaaattgtggagttgtttttgtcacaggagattgagatgttgtaaaacttttgctttaatctcttccccgtttggccatccttgtcccagagtcaggtcttttaaaatcttgttaaatacattgcagcttattacaccctctgtttatactagggactcactaagaggaggtgtcaatgaggtaaacattacatgaaagtaagggctgtggagatgaaaacagtgcttaatggggcagcttggctagtgggaaacaggctctgacactgaccagagctggtcccacagggagctgctccctttccagaaaaaatgccacactgccttttagccacctttaaaaactatctatacttgtttacacaaaagtgtttcaaaccctcttctgctataaattgtgtatggctcagcctgtgcattaggactcatactaaatgtctttatctggaaagataaaagaaatatttacgattcctctgaaatgtatttgcttttcccatggctttgctaataatgtgatctcctaaaaggagccgcttaaagaactgctgtttatcttacaacacaaacagtagcctaaggcctctgatgttttccaacatctaaagtctaatgaataattagggctttcttaccccccacttttttttctttttacttttctctgaaaagaggccagtttatgaagtttacctggttcttaaggagaggcatggtgaattgttttgctttcccagtttggtttcttgagttcataatgtgattaaagtatggcctaaaggaaatacaaattaaaaccacagtgtaatcctattatatacctccagacttgagtgtataaatcccaatagtgtcatttgttggtgaggacctgctgcaaagagaagttccctataagctggtgccgatatgacttggtgtggaaacttcgtaaaaacagtatcatcttatagtgtggaactcatgaatactctacaattgggcattgcccctcttagcttaattggggcattgttgcataggtagactagaattaatagaaggatctttttattaatatagtttctaatagcaaaatgcccaacagaaactccaaatgaccaccctgtaatagagggactaattaggtattgttttgttcatataacactataaaatactgtagcaaaaatgaattaaatgcagctataaaaatcagcatgcatgactaaaaaaacatcataataggttcaaaagaaagttttatggggccacagagatgatataggggttgagagcacttgctgcttttctttcttttttacattttttaactttatttattgtgtatacagtgttctgcctgcatgtatgccagcaagccagagagggaccagatctcattatggatggttgtgagccaccatgtggttgctgggaattgaactcaggacctctggaagaacagccagtgctcttaaccactgagccatctctccagccccacttgctgtttttctagaggatgtaagtttggtcccagtacccatgtttggcagtacagttgcctataactcaaggtcaagggaaatctaacaccgttttctggtatctatggactcctgcagatgcattgagtatgcttgtggcatacacaaatgtgggcacacatagacacatcaaatgtttaaaaacaacttccagaaaaatatacaagacattttcatttgaataatattaaacaatctcataaattaagaagatatgactatatgatacaatgtaaggaatgtgaatggactattattaactcaaaaggaaatagtggttatatttgggggaagagagcagcaaacagtgatggagagtcacagtgtagttaaaggaactgaccttgttcacttcgaaaatgatttattatttttatttatatatttgtgtgtctgtgcatgtgtgtttgagagcccacagaggactgagatgtaacttgtttgagagttgaggttataggtggttttgagatgcctgtggtagatgcccagatccaaactctggttctcttcgagagcaggatgcatcctgaaacactatgctggctaactttatgtcagcttgacacaggctagaatcatctgaggggagggagtcccagttgagaaaatgcctttgaaggctgtggtataggcaaggctgtagagcatttttcttagttaatgattgatgggggaggacccagcccattgtgggtcaggtaggtggtcttggattctgtaagaaagtaggcccagtgagccagtaagcagcacttctccatagcctctgcataagctcctgcctctaggttcctgcctttgagttcctgttctggcttccttcaatgataaacaatgatagggaagtgtaagctaaataaaccctttccttcccaagttgctttggtcatgggtgttctatcactgccatggttacccaaactataacaaccactgattcatccttctgtccctacctcttccctttttgagacagggtttcattatgtagccttggttgacctggaacttgctatgtagacaggctgaccttaactcacaaagatctccttgtctctgtttcctgaatgctggggttaaaggcatatgccattatgtccagctctgtgcaaatttctgaaattatgtggctacatgggcatagtttaaaaattcagaaatgtattatataacatacaaacatgaagtttctcataacagaatgccaatacatggcaaaaacattggcttgagaagcagtcacatgggaccttatctatttggttgcagtaggttattcttcaaattctcaatggctttatgaaggaagtaaaatttatttttctttcatgctatatgatttgactactgtggtcaccccaggacctgggcagatagagctgctggggaagagagttgctatgacttttactgtacctttagattatcacagggaaaaatgggaggaaggcagaaaagcataaagactcagccagggtgactaacatatgagaaatgttgagatcattactgtgtcttttattctgacttctagaagaacacagtttaggtttttgattgtcacagctgtgatacagtaaataaaataaaatgctgcattgaaaggctttttttgtgatggtcttgggaagggggagatagaatacttttattttgaagaaaagctaatatacaccaactaaaatcttctaatcagggtaagtgttttggggctgtctttgttatctgtggtgaggaaaggctcaccacttcccttcccagaactgatgaaaggcgtgttgcagtggtgaaaggggtgtgccggcagatacagcagcagtcgtctgacacagcaactagaggctgcaattgatggccaagatgtctgtcacatggtgcagactcatcaccatcagtggtacacctgtatccatgcagtaaaacgggggtggggggtgggggatgttgcatcagccttgtggcatgggatgtcaagtccagctcttaggtctctggtctcatttccttgttcaggacacaatgaaggatcatgtcacccatattcctcttcattcaggttagggctgtgtgttctagataatctgacagagtagacatgctgccatatccaagtttgaccatgaagggacaatgcagtattccatatttctcacattctttgtcttttggcctgctgtggagcaattacccaaggaaacattagatgttaggagtctgggcatctaatgaggtttttgaaggttggccacccaggtctggtggatgatgatgtaggcaagaagtgagcctggattgtggagctagtgtgatctagaagttgttaattttatcaactagtgttaggtaaccataagtcatgtgaagaatcacagcccttcaaaatttggctggcaaggtcgtcttctgagctgaatttagatcattctctggggcaagtcttcctggtgcttaagaatgtcttgtcatcttttctagaaagccttaaagtgggtaggcaagccagacttcacccacatggtgagtgatcatccagatttggtattataatttgaaaacacatacacgcctcattgatttaaaaaatttcatctcatgtatgaatttcctggtagtctctaattttgaaaattggcttacctttgcaaatgatataataagagctgagtatttttagtaaaaagtgtgatatgactttagagttggtgttctaattctgtaaatgtctggccaggctacacttttttgcctcagggtaaattagaaatgataaaatcataaggagatatggttcaaatacagttttatgtgtgtgtgtgtgtgggggaatagtgggagaagcacacacaaagggaaaaggacgagagtcccaagtagactgccagataaaatggcttctaatttttatacatgcacaacttctgctatagttggggagtagagaggccagggaacgagaaggggcccatgagagagggaagaagagacaggacgggcaatgaggagaggggtgatagaacacatatgccataaaggtaccagggtgagtaaggggctggatggatttaggtgggggtgaagggtggggaattgaggcagagcaggagggaatggaggatcaacaaatgccaaacatttatgaaaataaggaaatctggtaatttgtatttcaaaattgtggaaagttagaagtgagctagggcttcatgttggtgctttatttgtttaaaatgactccctagtccgatattaagagtacatttaattaaatatgagtatgtaggtatctatgaagacatagcatgtccaagaacttcagatctgaaaagctgtaaaactgccccatcaaaaaatctgtatgagttattgggggcagggtcatgggccatggtagtgcaaaggcagggagtaacagagcaatgataacaccttcaatgataccaccaggaagttatacagatctatttctctccatatccctttggttcgaagttcttactgaaacagaaactgaaaatgtgatttttaaaacagttcaggtgacttacattagctgggtgaagaggagcaaacaataatttgaagtccataatcgttcttctttaacagtgtagaaaggaaaatgatcgctgctacccatctgggaccatgtcctggaaccatgataatggtaagcccttcttgatggaggagagaaaacctagaagaatcttaaactctcctccaaactggaaactcctgatagtccttaattgcctgtttatgtgagaggaagaaatgctcttctcagaacctctgtgattttgaagctttgttatctacactaacttatattgtaagtaacgcagtaggggtggtgagcgtgtgagtctgtgtggatgtatgtgagcctggaatgcttcactgttctgcccatgctcagtcttatgttattactcactggggagcagctagcttttctgtctacttactcagcagctacacagaccggcaggaaactagtcttctctccacccaactgtgacttcattctattagtctgaaatttaaatgaggagtgagttaatatacggaactgtaccccagtggcctccaatttgttctcttttcacttagagggtcaggccccatatacttatgtctcacactagcagtacaaattgtacaagactctaaagatatcaacccaatcagaagtaatacgacaataaaggccagcctttcttcattgtaggaaaccttggtgtgtgaaaatacagatacatttagaatgtgaatgcctctataaaattgtgaacccttttcagaataatttactttatgcctaataatttgctgaaactcgtttcttaaatggcaccatttccttacacatttatagcactaggtccaaattcttttttactttgaattttcacaaaatccatctgttacataaaatgagatatgtgggctcaagtgcccatcctgggtccaaataaaatagatgggaattttagagtgtaacagtattgacatgaatagtcagtatgagggctggggatatagcttggtggtagggggtttgcctaaaagccaagaagaccagacttcaatccccagcaacacaaaagaaaaagtgaaacaagcaaagttgtagccaatgggaaaatcctgaggaaaaaaaacagagaggggtgttttctaaggcaaaagtaaaggaattgaggtggattttgagtcacacaaggtcacaccatctgtatttcttccccatcacacgttggcttcgtttgcatacatccctttcctcctacactccagagttcatgccatgtggacttcatagctttatgtcttgtatattttgaatgtcattttcaaaagtcttaactctaggcattttggcttcttgcaacattgctgtgacactaccacagaaggttggaactaaataattacgatcccttaaggcaagacctccagcttctgaagtaggccagacgttgtgtaaatacctttaacttctcatggcatggagggtagaaaaagagggaggccaggctttcatctgggctgtgcttgcatcctgagtctttaggaggtgcaccttcgggagaagctgggacagcttcctgtgttggaaggcattgcctttcttttctcctgtatctatagagaagtcacttttacaatctgtctcatccgcttggcagctccatggtctcttgctgcttgctgcttgctgcagctacattgtgtgtgggggtgggggtggggggagctggaaagtgtctgatctacaccaggttcaaaaaaaaaagttggggatgttctcagtccctcagtaccatctctaaagtcttatgtcctagttcaagctcttgggttctcccattcccaggagaaatggggatgacaagtttcctttacctgcactctaaatatgaatctatagaaagaaattcaattagacaaatgacatccatcaaggatacagatgacatatgtcactacaaacatcttttatacccgtgggctacaggatgctccctccccagggctcctcatgcattggttcctcatttatggatttacatcagtgagcttccacctacccaaagctctcttgggtctctccaagtatccagtggagtgattgctttaggagttttcttgcttttcttttacggttctcaatgctgattctactgaggggagggaaacaacccttctcattcattcttgaagctttgcctcacttattttcttctagtcactacgctgctggccctgcccttcctccatttccactaacatacacacactggagcacacacacacacacacacacacacacacacacacacacacagagagagagagagagagagagagagagagagagagagacagacagacagacacactcacacacacacacactcaaaacaatcttaatctctacttcaaaaatggttggcacaaccccacctaagtgtctgggtgacagacctccctgcaagtgagtcctggtgaccaatttctactctgccttttgttttgtttccatttgaccatagattccagaggggtagaatggagggagtgtgatgtactggaaagcatgaacatttgatctccccacttgtgagtaacagtgtgactgcttcaagttttaacttcatcgagactcagtttcttcatctatgaaatgaataaacaatccaccagctgagaagacagaagcctacagcagccatgcgccttcagaccatatgtgaggatagacaagtgttctgaatgccagagttgcttgatcaaaacagaaagggaaaccagcacaaaaacctagacattttctaattatgtattcttgtgctttacatactagggaagcactaactgggattggtggatggtacaggcctggtaagattgttcccttctcctcccttacccagcaatcctaaataggatcagataggtgtgtttttacctctaaatctgcacagaagttcctaggaagtcggggaagaggaggcaaagagatcattttcaagttgtaagacatgggtatagttgggttttccttcctgaagcccatttattgacttgctgaattgcactccctccaagcagacagggtaatgccacattccactcgtaggtgttctgctccagactgaaggcccaaggttgggaagtggctagaggtgaagtgtgtagatttccaatgactgctgactccctactgactgactactgataggcaggcaactggcccagccagacatggatagaattactgctgtgtgtggtcatttaaaaagccacaaaactatgctgtggtcatggcttcaagagctaggaggagtggacttgaggcttttaccaaccagggattctttctttagaacagcttcccaaacagcacgctttggattaagtccaacccccaggctgcttcagagagagcagagagatcgatggctacccttttgtacactcatcctgtgctgactgtgtgctcactgtgtacccaggggtacttttgaagcactctaaactcaatgccctcatttcccacagcacctctgcaaggcagccaccatttgtatccccattactcaaaggaagaaactgaggcagaaggaggtagttttctttataaccttctgacactaggaattatttctttttttgcagctgctgactagaaaaaagcaatttccacagattttatttatttttgctaaatgatctaactagaaccagtcgttcactaagcaattagcatgattattttgaataatgatggacaatccactagctgatgggtgcaacagggagccttactgatatttgtcccttgcatgccatgcagcccatcagcccatggcctggatggcacttacacagcacatgcctgggtggccaggttttttttttttttttttttgcaagaaaatcaacacttctctgaagaatttttaaaggggtcccagcagtgcattaggtttgaatacattcgtgcaacaagaatacatttgtgcaacaaattttgctttttattttgtctgctgggatggttacctgaaaattaataaaataagattttaaaatgcaattaaatgcccaattgctccatcggccatcgttaataatttttgtaggataggagcagcttttatgatgcatttcaggtccctttgaacccagaagaatctgctttaaattgaactggcagtatgcagggtaggatgcctggagctggaagctactagagacatgatgtaattaccaaagcatgtcacaatctttattgtgatgataaactagactattgtcagatgctggcagataggcttaaaaattggagtaaagggagttggaaagaatctgcaggaaagatgaaattgagtaaggcaagtggttcaaaattctgtgtgttaattccaaccaatgtcaccccgcttcttttgttctatttgttttagtaataagggctacaagggaactacactggaccatgctgaactcactcatttataagccaaggaaatggtcatccatgacaaccggaaaaaacaggtgaggaatgaacagggcctcatttctactgtgattttagcctgtgacccttgtgacaacacattgtcttcctttggcctcttcagatggcttagtttgatgaagatgcaaatgttagtatagcagttattcttaggcagtctgaccaggctttgtggttctactcccctctctcctctcttgaattcctttacacaccccagtgttcatctctgaggccagtggatctacgaggcttcctggcaccgtttgcttccatgtcagctacctttaatcttttcgctctttgtgcttcctgtattagagcacacaccaaagtatgttgtagttacctttattacttctgttcatgtcttaccttggccaaaagctccctgagggcagaatccatgttttgttcatcattattgcctccatatcacctggcacagtgccctgtacaaagtggatgcttaataacttcttgttgaattgaagtagcttaaaaaatctatcgtccaggctgaactgagaacatgaaatgtttttgcaagggtgcagatcatgttgtagattaagagctctttgagggagggtgagtatgcataccaagccaatccacttcttcgtcttcccagagcaattgatctttctcatttttcccccgttttcatccttcttgtttcccccaagttgaacagagctgcctagctttgcattctctctgctttacattcagcatagcttgcttggtcagggccaagagggtgttccaggctccagtggggcctctcctgtagcctctctcctctctgtgagactgtctctggaatgcaatactgacctcctctctctgcagggcaggatgtcacctgtgtggtgccaggaagagatggggcaatataaacaatggaaattcctttaatatcttcaggttggggcttagtcttacagccctagggcaaagcttgcattggcttttttaaaataacaattacgatgactttggtatgtctaagagcagagtctaatggaaaaatgaacacaaggattcttctctcctgctcaaatgttctcattttagtttgggacatctggtttaggacctagggaatgtcccacatctgtaacttccaccagctgaagcattcagcatcctctatcaggatcgtgatgttaatttccttcatctctgctttctcagatgagcttttttttttctcctcccacactggaatattcttatgacaagtcttaaaatacataaatggagacaaactgtgctggctgcaggaagggtccctcgtccattgctcagagagaccattggaggatatgggacttttggaggtggccagagttactcaacactgctcattcaagtggattgggtcagtggagaccaatgttccccagttcttccagtccacttaagatttcaagggttctctaaaacaccttattctagggcaataaggtgtcgggcaggttgcccaacacctgcccctccccattctgttgggaagaaaggctaacaacaagcagctgaggttattaaaaaacaatgtatctttgagaactgctaggtttccaacagatgttgctattgtttttctcattgtgtaaaactctctgcagggggaaaaggaagttggaagttggtccatgaagaggatagtaaagttctctgcctgggcaattccggtgtgtctgcttcccagctggtttttacttgccgtttgtaagccctggtattgtaggactttcttttggaccaccagtttcaaaacaatgacacagagacttcgtattaattatggaagcctggcctttaggcttgtctcactagcttctataatttaaattaacctatttctattaatctatgttctgccacatggtttttacctctctcccattctgtatgtctgacttgctctgtgtttcgctggcatctccagtgcacctagattcatccccttgagttcctctttctgcgggaagtcccacctaatctcacctgcctagctatttattggccattcggttttttattaaaccaatcacagcaatagatcttcacacagggtaaacaaatatcccacaacatcttaactttgatgatgttacctttgtttgctctctcagtcaggctatccagtggtttctgttgggtgttctgtcatctgtcctgttgcttcaatctctggaacctattctttattcttttgctgctgcttgctttaaacttagcagcttctctcatttgaaatggaaagcttgattgtcactgatcattctgcaacctttatagagcaaagcatgcagagcaacaacacctccttcaagtaacacctgacaaacctgcccaacaccctccccccacccccccacccccgttttttctgatctttcatatttgttgtgtatctaaaagtctcaggcttcctggagcagggttttggagcactctcctctttgtaacacacatgaaggtaaggtcctaatcttcatacactgcatcagtactctggacccaggtgaagctaaggaggaagtaattcactcctcacatgcttcagtgagcaaatctgactagatagttatgcacctttaatctgccccttccctggaatattaaataggctactgggcctgccatctccagaaactacaaagaacaagtttttccttcattaggaaccttaagtaatgctgatatgtctacatagttcttacaggcaatggtgtggagggcaacagatgcattggagggtttcagatccctgtgttgagagaaaaaaaaatataacagaagctttccccattccttgtgtttctatgtgcaggatacatagggagaaggcattttcatagacatttagaggcaatcccaggattctttctgtagtcagcatgattcagtgtttgacaataacatattttcccttgctacctttcaagatagtagtgatgcatatcacaagcaaccacagattcaatgggatataagaaattatgtctgttgctcatgcttcagcggacaatgagatagttctgttggtctgactgggttcattcttgtgaatgaggattgggtggatttgaactgatatagatatacctaggctggctctctggctctttttcttgtactgcacagacagggagaggagcattggtgagcgaaatatgctatgactcctggggtctaggatggcactgagcatagcatatttccatctggggaccctgtgtatttgctaaaattggcaacagtatgtattattttactgactatatggctgatctcaaagtaagagggcaaactatgcaatgttacacagaaagacttagaaacagacagcaatgaaaacaatctagcccatagactacttggtgaatgtctattttttttggggggggggctacaaactatcacatcttcacgttctctgtacattactagcaatgatcacaggcattattttgagcaccaaaatgttgtcttgtctgtataatacatcacagaggaaagttaatgggtacaatcccttattaaagtgacctgtgttctcacaacagccttctaatgcatatgaaggatcccgctttagcgatatgataaatttcttcatcttttaggccttcatgtttctaaagagtcaaaactataaatgtcatctctaaaaacttcagggtatagttagagaagatgagagggaagtgatgcagtctggaagggaagagactagaagaaagaagtacagagccaaaaacagtcagatgggggtagagaaaactgggaaggaatgacacaaagaacaaccggaagaaggcacgcaggatgtagctctggtcatggttgtgatctgtgtaatcatctgtatcagtgttgatgatctttgctccttgttgctgggaggttgggagagactcttgatccacaccagttttagagacagtgaacttgttcttagctggttcccttggaagtcaaaaatatatgctagtgtgaagagcatagctttctttgctaaaaggaagggtggtcagaaaatcttacgtaaaacttagttgcacataattattaaaccgtttttctcaattatatcttaattttatgattaagatttctagtcattggagataaagaatgtaaacaacatatttgactcatatttctgagttaaatatctctctgggaatttcaggtgtacttttgttaagtgaagtaactcagtttttatgacatgtgagtgtttatttcaaggaaataatgagatatgaaagaagaaagcaagctattcttttgccttgattttattgcttctgaagcagtaaatattccttggtttgagggtgaattgttgtttccttgaaaaactagaggatgtgataatggggctgctgatgtttatttgacatacttttaagactatccacatgtaaagtgtcaagcaaactcccaaggatactgcatatttaagagcataggaaaccactatgtccttcctgtttgctctgtgctcattgggaaatatatatatatatatatatatatatatatatatatatatatgttgttgttgttctgaattactgtaaaaggagattttcccatctagtctgggtaaccctggacccattttctctccacacaccaggtcccacagctgcttaatgaaataactacttagagacttaatatatgtggctgctcttggccatcactaagttcgagtatcaggcgaaagcctggagatttggatgaacgacaagatgcctggttcactttctgagagaagcctctcacctttattgtggaacagccttatacacaaacttacaaaaaccccaggtcaaagggttcacaacaggatattgatcctagtggggtgaggtcaggaaaacaggaagtacctgtggttatgctggaaaacaactcttagagaccctgtgggggctgggtcccaacaaatacagagttataattgtttagccaatgacttaggcttcttcctgacctgctctctcttaattattaacccataactactaatctatgtatctccacgtggccttatcttattggagaatgcctgggtgtcctatcttcctggtagctacatggcatctgtctgactctgcctattacctttctctgtccctgtttgtatttgttgcctggctaaatcctgcctgcccattggctgaaacagctttattcatcaactgacaagagaaacatattcacagcataaagaaggaactcccccatcagaaaccactcaatatgtctgttttaaaatcttacttggttctttaaaatgtgtatttaattattatattttgtacagcttagattgacaagcctaaatatttaaagatagtagtatatcagtagtgtatcaaatctggtatattggtggagcagagggaatatttaatactaagtactaaatttttacaagttttgccaataaaggataattaaccaataattagaaaccaatatttaaaaacagtgcctttggttttcacagcttatagtccgaactgattcttaaagtacatctgtttccagatctccaggtcagggttcagaaaataatgaccaagccagtgtcatcctgttggaaaccgtcagaactcaagtaggaacccaaggttcatatgtccaggctaggacatctgcaatgtagcattatgattgtcgagacggaagtgactggctaggactgggcttgggcttgtgagagctaatcagaatttcattgaggagactgaaaaggtctgaaatgtttgcagaatagtttagtaaggacaactgtgagagttacacaattagataccaccttagactattttgtgtctctgtaacattatttttggtttatttttctggaagcccaagtgaatcatgccaatttagctttcggtttagagcggtatgctgctttaacacagggcagaaaatagaaggcaaatgaacacttgtcaatgaaaagaaatggggcagactctgacaactgagaagcattgatccatgcatgaaggcagatcccctgtgacatcaaatgcctcctggagtctccgtcatctctccacacagttacattggcagcaaaactcaacatgatgcttcatggagacaaaatgtgtttaatcataagtggctctaagggaacaataggatgttctgttaggagcaagaatgggagaagtcaggctttgtctgtttaggagaagaatcttgggtgcaaggcaatattttcttccagtatctgtgtatgtgggaaaggaagttttctttctgcagttagaagagaaattgcaccaaggttgataaagcaacaagaaaatagctgaacaagaaactgtggtgattggacaatttagggtcataaggaaaggcagcaggggtacagcctgtagtaaaagatgacttgaaaccttagactatgcttagagctttagaaagccctgtgagagagtgtgttgaagagatgcagtgtgatttgcaaggaggcatgtagggtgaggcaggaacaactgccttatttcggtactttctatagaaaagacctttacactatcaaggatgaaccaagcacttacatgatccccctcccctagttctattttagtctcttacttacattattagtagagccaaaacaccaaatgaaaattgtatacaaaggatcagaatgaaggctgaggtaaaaaatgaatgtgtttgctcattaagaaagaagcaaaggaagacctgttgaagggataatagtagcccccactcccaaattgtctaatatttattgttccagagtctcttgtttctcagggatttctgtgtctcactagcttctcctacttagtcttatttgtaaccatgttttgttctacccaccccttgcttatggtttctatagtcacttccaagatcctgtttcttccttcctttccttttcctccctgtatgtcttctacttcttccttctccctctctggatgatctacttctccccctgttagacccccgaaaactcaagtatccggggtctcaggccaggttcgcggtcaccccaatcaccaggcggattcgagagcttgctgcaaactgcacgaggctttattgtaatttaacgaactaaccccatgttagctcgggtctttcacccacccgccatggcagacggctagaaaagacggctcctaaggtctccccaaagatcttatagggcagcgtaaggggagtgtctaggggtacgcacaggctcacgattggtgtgcctccaggcttggagggcttgccctgtgttgattggtcaactggttgttatggctcataggccctcccagggtggttgctatgctctctacgtcattgctgtgcgcttgtccgtaaagcacacccagggtcgtaaagcatagcgccaccagctaacttccgattggttccttgtcacaagacaggcatctgacctctaagtgaccaaggcaggtttatggcaagcacgtgttcggctgttatggctgccaaaagggaagccggttccttcaccccttggatgaacatacttactaggacagtcattgactgccatgcactctgtaagagtgcctggctttgcaaagacttttgtattggtctcttataccctgtccacctttctgtcttccagaatgaatgatctcccagaaacttacagatataaatctccataaatttccttttttagatttatcacaagtgtgtgtattttggaataacttgttactggggatgtggcttagtgatctagcacttgtttagcttgcggaagacggtgagttagatgcccagcagaacaaaataaacaaaatttaaataaagagtgagggatagagttacagcttatttcatggctttatgcttgtgaatttttccaattggtaattatcactgaagtgattaaaatgttattatatagctgtagattaatatgaaatgtgtgttctgaagatgatgtttaatcaaagaaagagtaactgcttgactggagccagcactctttcctgcccctcttaaactggaggaaatgtctgttacacatggaattgtacacaattgatgagaaaataattttccccttgacacatatgacactggtcaaatgcaatcagaatgttctgtaagatgtagcttagctattgtttcagaaaacctgctcaagcagatgccaagattaaagaactagaagcaccctgttccattaaatcttctgggctctcaggagttgccaagcaggagagctcctggattgtggtatcctggctgaattcttcttggactagaatctaatgtgagtagagacttcccgcagcagtaactggggaaggaacatctgaaaatcattatgaaactgatattaacctgccccagatcacattgtttagggattggttacaaaatgttgcttatgatcaggaagaaagttgaacaaaggggattatattcaaggtttttgtttaaaaaaagaggaatccagatatgataggataaaaagggtagattattgaatctactctgaaaagaataaagggagatatagatatgataagatgaaaggtagattattgaatctactcaaaaagcaactactagttttaaatattttacattggattggacttctgtatattgtatacaaatgttatatattgttagacccctggaaaactcaggtatccggggtcccaggccacgaccgcggtcaccccaatcaccaggcagattcgagagcttgctgcaaactgcatgaggctttattgtaatttaacaagctaaccccatgttagctcgggtttttttgtccacccaccatggcggttggctacaaaagacagctcctaggatctcccaagagatcttgtagggcagcgtaaggggagtgtctaggggtatgcacaggctcaggattggtgtgcttccaggcttggagggcttgccctgtattgatcggtcaactggttgttatggcccataggcactcccagggtggttgctattctctgtgtgtcattgctgtgtgcttgtccataaagtactcccagggtcgtaaagcatagcaccaccagctaacttctgattggttccttgtcacgaggcagacatctgacctcctagtgactaaggcaaggtcagacaagcacgtatttggctgttatggctgccgaaatggggggctggtcccttcaattgatacaaatttgagattaattttgctaaaacatatactgtttctaatcattggaagttattattatcaactatagaggacaaaaaaggaaatgtagactagtcattagtctactattacaatccaacttgtagtcacattaggtatgtttacaaggtcaaacagatattttagaaagacggttcgtcttcaaacacttcagagatctacagaataaacagacagaacagaacctctgtctataaatggtgccactaacatgaggcaagaatttccacgtaaaacggaactgcagtgggcttcctagtctcacagtctcaagcaggctatagtgcagagatgctgtggcagtctggcttgaacatagcatagcagattcccgttgcagtacacaaaggctgcatctccaagatgcacagcatgctacatggcagtgttctacaatacttgacggtggtatagataagagttgaagcagtgagcacagctcccaaagctggcagtaaacatatccctgccatgttggaaagccagcagccaaaacctccactttaattttagcgtgatgtttagcagataaaagactcatggtcagaaaaagatagaaatatacagttaagacagattcagagaaaaaacaaacaaacctctaaatggttacaatgtgtttaaaaataggtataggcttgggagagaaacaaaaaggatggagaaaatccttaaaaaaaaaaaaaaaagaaatagagtagctcagtgtggtggcacatgcctttaatcccagcactccagaagcagaggcaggcagatctcaaggccagcctggtttacagagtgagttcctggacagacaaaaaaaaaaaaatacacagagaaagcatgtctcaagaaaccacagaaaccaaaaaaataaaagtaaaaaaaatagtaataataatgaaatagccacataaagatggaaagtacacagaaagtctggatactgtatgttattgtgttgtctttgaattgtttgctgaggaaggagcaacagctgctaaaagacatttgattataaatgctgccagattaatcctacctatatattttaaaaatgccttgtcttcaaaatttaagtctgaggacatgttactttggaaaagaggttctgtttttgtttacacagaagaaaaaaaagctgtggattctttccagactaatatggtttgatcaagcaagaccccctgaagcaatggcccaggtggatccaacatccaaaacagctgagatcatgcagcctcagactgctacaaccagtatttggccaagtttttgggttttctcaggatacccatggcattgacagtgcccccaaacagcaggaagcagtttagagagaactatgccaacattaccaattactgtttataaatgtttgttttcatttaaacagggttggttagaaatggttaatgatcatagttaattgctttctaaagaaaaaagggaatatgatatagaaatgtatactttgcattggtatggattttggtttatcgatacaaatttaaggtcaattttgatatatatgtatatatatacttgtttagatattgtgtttatagagatcttttaaaaatgtaatatatacttaaatacagatcatagtcacctacaatagtcaaaatttacagtcatgttagttttctagatatatagagatatatttgaggtggataaatattcttcaagcctttcaaagacctacagaatatggcatttaaaatggtttattagggtttttcatgacaatgagacacaactgctcttgtcaacactgattacttcaaagaggaagatgggcattgaagaaactcattatggaatttgtctttgacatgaaaagactagtcatttgagctagaaactgctcttgcctagactgtttgactgtatgctgtccaaactggacatgcagaacccacaggaatgtgactgcttagcttgcccaaacaagatggttcagtctttttgctttgtggaagagtctgtcagacattctgtaggacatacagagaaatgactgacaaactgccagtacaggtgggacagtttcaaatttcctgctttgttgaaaagtctgtcagacactctaggcctatagaccaaagatggatgcccgaatgttacagaggaactttgggtgactgtccaggcagcaagctgtctctgttttatatattatacttctgaggtctttgatggagttgaagacagatagttatggttatagttttccttagttatggtaagttacacataaaactttaaccttacaaagacagtatagatggtagaatattttctttaaattttgccaaatattaatggacaaaatattgttaactacagttcttaacttgataactgttttgttatatattattttactatgttaaagtcaaaaccattctttttatatagacagaaaacaggagacaatgggggaatgtctttctgtatatatgtttcttttaatggttgatgaataaaatactgattagccagtagccaggcaggaagtataggtggggctaccagacaaggagaattctgggaagaggaaggctgaaaggagctacaagagatgccatgtaaccaccaaaggagtaacaggtctagcctttctctggtatgccatgaccacatggagatacatagtttaatagaaatagggtactaatcaagagagagctagccaatgagaagcctgagccactggtcaaacgtttctaattaatataagcctcagtgtgtttatttggaactaaacagctgcaggaccaggtggaacagaacctccatctacagtacagacttttccatcttcagattatacagaaggaccttctttgcatccatcaaattgcacttgagatgtagtttataaaattatttggtttggaaatacagaagaaagcacattttaagttgccatatagcttttattttaacccatcaaaggatttaaaatttcatatataaccctaaactacaagactgtcacctgtgtgttcagacaatatgaccacccttcaagaaaaatccatgaggagatcagaaagatggctcagtggttacgagcactggctgctcctacagaggaccctggttcaatttctagcaaccgcatggcagctcacaagtgtctataactcaagttccaggagctctgttgccaatgcacataaaacaaagttaaataaatttttagaaaaggggggacatctcctcaacaagactaagtgggtgcttttgttatcctgctgtttaggattattatttaatttaagacactgtcagtaattttgttctgaaattatctctcatgaaagtagctggaggcctgctacacagaaaaaacactagactttgtaaagttcagtatcctcttcttataccatgtttacatagtcatttatatacctaccatataatcatcatgtctcctctaagtccctctgtcccctgaggtaccttttggtacctatactttcaggcagttactaggtcagccctaactccgagtggacttgtttacttgaggtcccttgttagctagcttgagttcctttttgactaattacatcaagaagttgtcatttagtatgagcaggggaaaaaaaaaaagagtatccataataggagcatggaaaagaaaacagtagaaactaacaggagagtggagtatacttttggttagtagcaatatccaaattgctcacatgcatgtactgctgattatagcagagagaagagtggcaaagacttataaaaatgccttctagtatccatgacagttcttacttgaatatcaatacaacacaattcctgattcacagatgagaagacttaagttccaagtcactcagttagtcagaggcagagccaagatttgaaccctaatttgtgctccaaagctggtcttctccctgtatactgtgcacatcatactctgcacagtgtcattgcttattttgtttaacaatgccccgagaaagaacatgctgagttaactgcatgatcatgacaagtatgaccttcctaaacaaaaataaccagaggaaatatcctcaaagaaaatgaagggaacacacatcaacatttccaagaaactggattttcagattgaaaattcccatccacaccaaaagataaacctcagaattggggcctcttattcctcctgacataaccaagggaaaggagaaacagtatgctggcctttctgtgcttttccaggaagggctagcatgaatgattgcaagatgctacccttgagtgcattctctcccctctggtcatcccaacccctaaatgcattcctcacaggattcaggtgaaagcatcttactccacaatttagcaaggtgaagattttgttgttgttttggaggaagagaagggggatggggagggtaaagaaaggggcgaaagagagagggggagagagaaagaaagagaatattcaaagctgaattcaatatggttgggttctaatctcacatttcttagcagaggcacatttttcttttggatctgagagcactgctggctgctatctgcggtaagaaataccgtcctgaggcagatgcctatttcctctgccaggctggtgtggaagccgaccctgtttcctcttccatctggacgctggggaagcagcaaggaggtgtcaagcattctgccccaaacattctttctcaccctagtactctcctcctatctaacatcttttaaaatagcagcaaacacttctgaaagagataactcaagcctgtgaagccaggacaacagtggagagaggcggtgtctctgaacttgtgagtcatgcccatgctgatatctaggcaagctttgaactctcagcgcgtaagcatctgtgctgttgactgtgatggagggtgtaatcctggagtttcattggagattcattaatatgcatgttaaaaacctgcagtctgaaggggagggatagatgcttcttcatgacttccatccagaaacggtcacttagttttggctgtgcatgtatctcccagaagtagagcagaggaagaaaggggagagaaggatgtttcatccgcacttgttatccaggaagactgtggtgagagaagggaaggagcatggctgtcccacactgctgctgtgcttgatgatcaaagcagagctcaaagatgttttccatacagagttcaatagtaaatacttcagatattatgagccatgggtctctgttacaacctctgagctctcctgctgccaggtgaaagtagttgcagatatacctgtattcaaattaaatcttatattaaaaaaaaatcacactggtaagatttgtcacaaggaccacacttttctggtccttaaccaacaaatttactttttagtttttaatgctaaattacaaatgaattcctgaatggctgatgaccatataagaaaataaaaactagaatgtttcaggatagccttgttaagaaaatgtgagcaactttagaagcaggaaggaagggtagatattttttttcttttcaaatttttttatttgaattagaaacaagattgttttacatgacaatctccgttcccttctccctccagtcctcccctactctaaagccctacctatcatcctttcttctatttttctcctgactcaacctttctgctccctcatgacctctgcatctttcctcttcttccagaagggtagatcttttggtggtggtggtgaccttttaagactggtcttcttgtatcattcagcctgcctcagattatggttctcctgtctcagcattctgatgctgggattacaagtgtgtgctactacacccagctattggtctttttttttttttaatggaaaactaaacactagtctagatgactatgtagatactataattctctaggatctgcagcttttattttcaacaaattatcacttttaccttgtaaagtatagaaaaactgatagtcatgcaattcttcctgtccacagagatacaagcaaccattctttattggagaggtaattggttctgccctgtcctccacttcggtgtctagtaagccattccttttcatcctgcccttgccagggccatgcatgtgtatctgcacttgggacttcacctttgaaattatttttgtatgtatggtgtgtgtgtgtgtgtgtgtgtgtgtgctactgatttctgtggaggtcagaggtttagaagttctttctctttctgccttgatgcaggttgaggattgaattcagtctgtcatgcttgctctgcaagtgcttttagcactgagccatcttgccagccacctgcattagggattttcatttgtaagataatctggctgcttgatgattttatgtcttcatgggaattatgattctatactttaaaaatcaattatcttagagcatccaggaaaggatagaggccatgggggacagtgtgctggacacctcttaggtacctatctgccactctagttgctacagttatttccttctagtacattgagaagacagtgaccttacctagacccatacaacaaaactttcacttcctggctgcagtttcgtgacagtgaccttggggtcttttctactgagtttgaaatgataagaactttggatcactcacagggctaactagagacgaaagatgggggtggagaggcgagcttctgcttcctcacctcttccatctactccatctactgcagttcagatttacattccataaaggcctgtaatgcatcatgaggggattccttctctggcctccatgggagccacatcctatagcactctgttttggctttgcctgctgtttcccctcccttgcttgctctcagtgcttgggatcatcatgttttcaagcagaggccagcaagcctcttgcccactccctacttttagagaacacaagctacaccagaaaaaacatgactttcaattatttgcctagataggctgtcacagtgtttgctagaggcaacattcaccaggaggagggtccccaggactgatctctgttgggacagctcagtgccaaaggaacatcttctgggtgatgtgtccctgaggaaaaagtgattccattgggcatacaaaggccaataactgagggagaattgaactgggaagtcactgaacatatgctggaaaaacacagtgtgagacacacaaaggtcaggatttgagtggctgctgtgcaagattcattagacatagtgagtagactagtagattcacaagaagcttgattctttaaagaattctaggagctgtttccttttcccaacaatctacctcccattcttgatagcacggaggattaagcagaggaaaggacaacatccctgtccctcacccacggtcatggtcatatgctcccttccctccccatggttttaagcctccttccttccctgtgactgcacacctgagcttgtcacagaaacagaagggagatctgcattgcttgagagactgaaggtttcatttggcccagattggacccaacatctgaaaatgagactcctttaatgtctaagagtgactgggaaactattgaatgtgcctcagatattgccaagggtcagggaagggaaacctggctgtacttaaggagtctttcccatgtttatcccacttaattaactaggtatagttctttaacttctccagttttttttttatttctccttaaaattaacacaggcttatgtataaggatcaaatgaaatgcccattgaatattgacttaccgaaaaatgagaacaaaggcatgagccaagcctgctgcggctgcttgtaacatggaacagacattttcactcttcaagaggctctcaaccatgagataaaggcaagtgtcacatgtgctcagtgctttcattcgctcattttaaatactgacccaattgtgacttttctttaggcaactcagtcgggtaggtaccatctttatttttttttaaaccagtctcatttctagttcatatctatcagagcagttgaacacttacccaccatcttctagatgactcctctgtgggattttccctttgtgatttccctaagaatatgaaagcacattccaccaagcttagaacactattgggtgcatgaagttgaggctgagatacacattgtcttttcccttcttgaatgttttacttttagcaatttaattctgggagcacatacataaattctgctttaattcataaactgttatttgtcactcaatcaaaatgaagatgtcatgttaaagatgagttcacagaattatcagaaccccaatttttgacagaagacatgtctccctccctctctcactgcagcacttttgacttaggctccattttaactcaaaaaatatgtgcaacaaagcattaggagcagggagaggtggaggccgaataaactccagtttaaggtcagtctggactatgtggtgaaaatggggaaaaggaaggataaaatttcttctgtggtatggattaattatataaattatctacaaaacttctctctttgattgcatgatgcacagggtgttctgaatactagcagtagcatatcgcttctaggcatgctccaaacacacatgtttcctttgggaaagggaagaagttctagcaatgacccgtgtctctgggtgactatgtgaatcatcttcagtgctgactctcaaacaggcttgacctatagtaaatgccgaaagcacaaaattttgcctcagtaaattttgattattttaactttggtttttctatctctagctacaactccactgtcctctgctcatggtgactagctgacctgtgtgccccatgcacttgatagtcactgttaagacaaagcagtctgatttatattgaaatagctaatgattttcatattgtttagacaagtttagacacataattaactatgttattattttaatatatcttctatcctttttgtattattataaactatagattttttcacaaactatttcattgatatagactggaactccaaagctgaatatctcctttaccttgtctctcactggttagtcacacacacacacacacacacacacacacacacacacacacacaccctctcctggaggaaacccctttacaatcagagatcggtggtccattctcagtttttggttattagtctgactttttctttgcagttggctcaatgtttattagtatgcctaccagaaaatagaaaatgcctaccagatgaacaagtttagaatgacaccacttggttgcaaatatttctaagcatattaaaaacagatttttgtggagggtaaggagccatgccctacttgaattctggctccttttgagagtgttcagttaattataacaggccaatagctccccagttaccatggctaacttaaagctgactgtcatacaaattggctttacagatcgtaacattggatatcagactttcagaaagattgttttaaagactttcctcctgtgctaggagaaagaactgattgggagaataaagatgaggtaaaggatctgaagtgacaattgaaagcctgtgcactgtgagaagcattcaagtaattttttaatgaactagtttctttgacttattttaaaacctgtgtgtagggggaaataaaagcgtgacaggaatataatagataggaaaaaaattaaacaagattctgtgccattagttatgactgacaaggaaaagataatagccaaaaagcaaatggactttgttagcagagggagataatgatgatgggactgttacaaatacatcagggaagaagtagatgacagggtttttatttttttcaagttcagtgatctccaaagatggacataaacacaaatgcctctaaaatggctgtgatgttgaggtttagttctgtatttacctgagaaatggtgaagggacatttaggtcaccaatgagtaatgaagaaattcgcaaacatggctgtagaaaacagtaaatgacagtcagtacttgagaaatctgaacttgggtaaattagccaatctggctgacatgcctcctcttgggtgacatgagcaaaagataatgtgggttttgtttgttttttatttccaaacctaattttttttaataaaacaattgtgttgatttagcatgaagcaaatatctaaatgtattgagctctgcaacttccaactttcaaagaccaaaagcagggagggttggaaaataaatatttgaatatatgttctgtgccttggtttgctcttcatgatcacttctctcttaaattagagggtcaagaatcagaaaagatttgacacagtttcttacttaatgtgagtttttgtttgtttgttttgtttttcaagacagggtttctttgtgtaacagtcctggctgtcctggaactcgctttgtagactagactggcctcaaactcactgagatctgcctgcctctgcctcccaagtggtgggattaaaggtgtgcgccaccactgcctggcccttagtgtgaattttaaatgaagaaatataaataaatacacgttttttcatgtttatttacgacatgacaatgtttttcaaaacgagatggtgatagaagagggcccatttgtttgcattcaatattctacttttcacatctggcatttcaggcagttttccagatagctgtaacttgtttgcatctgcacttagtaacaaatggactaagatgacaaagccggacaatttatctatcccaaaatgagttcatgtttagtcacttcagagacgaaaatcaagacagtcattgaattttggggcagaaagcttagagagaatcaagaagccttttgaaacacaaattctcactcatagcaagggtctagctctggcaggacagactcatcacggtttatggaatgcttgcaagttaatctcactttatcttagacttcaaagttttaaaattccacaatgtgcaaaatgtacaagtatttatacattagaaatgcttgctaaaatgtattaaatatagaacaaaaatggagaggtttgtaggagaatagatactttgggaacacagctcagcagtgtagcactagtctatctgggttaggttctaggttctaggttcaagcccagtatgaacaacaacaaaagaactgcaatgataatttttcaaggaggctttcctcgtgtctaggggagtttcttaccctatagtctgtatttaggtaaacatctcatatgtctttttaatttcaaattacttgtgtcttttatgaattcttctacaatttgatcataggatcttctgtggcatggagataaacaaaggctaaccagagcacagcactgcagagcttgctgtggcaaagagaaacagccagtgtcacttggtttgtgtagagatgcacaggcaggtggaagagtaggaaactgctagagcagaaagtgagaaactagtgagaaactgcggcaagaagtagagcattttcgtggctagggtattgttgtggaatataagttgaagatgtgttacatttctttatgccatagaacaatgctttaatcatgcaaagatgtgatgcattctttttatgttgtatttgtttaactctgtgaagctgtgttactttgtttaaagcacctgattgatctaataaagagctgaacagtcaatagctagacaggaaagagacaggcagggttgccaggtagagagaataaatagaaggagaaaaagagaagagggaggagcaagcaagaggagaaggaggggaggactcctcgggccagccacccagcttcacagtaattcatggagtcaagaaaagtgtatagaaagataaaggcctagaggcctttaagctaagaaaagctgcctataaacaagccaagctaaggctggtcattcataagaaagaacaaatctctatgtgattattagggagttgggttgtggccccgaaaagagtaaagagtaaaaattaacctctgtagggtacatacttggtttctttgcttaggttctaagctacaaatatgagagcaacaaccacactgtctacatgttcatatattttctaactatcatttgtgaaaacaatactgctggatacttacatggcattcacattgtatcaggtattataagaaacttaaatgatttgcaaacattatgacaattgatgtaaaggatttgagcatcctcacattttggtatctgtgtggggttctagaatcatctcccatggataatacaggattattgtatttagtcccagtgtctacctaccttaatgataattccacaattctacttgaaaatactgcactaaaattttgttttcacaatttgtggaaagttaaagaaagtgacttaaaataatttgaagaccttgtctccaaagtgaagaaaagtggataccacactccgctgtgtctgagttaattctgcttttccacttggtatttgggaaaagacctagaacacttcaaaaggggggggtgctgtgctacagtggtccccctgggctctttctaaagttgggcttgtgtagaatacatgaactaaacccaaacaacaacaataataaaaaaacttcataaagtataattgaaaaagacagacaacaacaagcaagccacaaaccttagtgtattccaccctgggtggagaatacaggaaggaagttctttctaagaggaaaaatatttctcattttcttgaaaacaacttaggaaactgaagtaaaaattatattccttattaagaaaggaaaacatgtctgaaaggccaaatttaatgcttactgaaatcactatacaaaatagttctcaaataagtatttgtcaaaaattcgaaaacatattaagagtttttaacaatacttggtcatgttaagggaattaggaataagcagaatagtgaaaataggatgaaaggatcaattagagtcctgaagctcaaagaaatagaaagtttgctaggtattttttttctctgcctctctagtaaggaattttaaattaagatgtaaataaatagaactgtacccccatcccgattttgttctttttgcttacaatgtcatgtagaacattctttttaaagagcaattaaagatctataagtccccctcatagtactaccccatttgttttgtttatttttcttaagtgtgaagatgagggttgaggtagtagttcatcttccaggaagcctttctgaattctgctactgtacatccaaactccagattgtgcttggttcagagttaaggggaaatggcctgattaatcatttgcttacataagccaataaagataaactgctgtcccttggtgcctcaggctgattggttccaggacacacactccccagataccgaaatgccttgctttgactgacacccagccctccagccattacgtcatctttagattgctcacagtgcctactatgatatttttgcaatggaaatggttgttagactatatttatttcttaggaatcatgatgaagaaaaccatctgtacatgtccagtggagataattgttttcctcaaatattttcagttggagtttggttggctccttgcatgtggaattcaaggatcaaagtgttgactacatacacatttccaagggtcatcgaccatgaagttcagtcattaataacatcacacaaaagaaaaaaaggtgtgtgttttgaggaagcacatgtgcagaaatgcttctgttatgtgggaaaactgcaaatttttgagtaaacatgcttgttatttaatttcaacatgaagtcattgaacacagtgtgaatcttgcatttgttggtacatttcatttgtatactcttctgaccccctttgttcttcagcattccttctagctactctggaatgtgaaggggtaataacattgactgtacttgtgagtttgctaagcaaccactgttagatccttcttaacacacagctacccataacttttcataaatggacacctttgccatctggaagggtgtggccaaatatctatcagttgccatggaaacaaagccttctctatgggctagatattgcatctccttcaaagagtggtcatgggcaaaatgaaggctgtctgatgtgtcagttaccttgaacaacataagaaacttcactgccatagtatgagatggaagggagacataaaaaaagccagaaggggaatttcacagttttgatctgtatatatttatagattctactataatttctgcgttttcctcaagagtccataaacatttgttcttcattcagttttgccaatcttaaaaccaaagacaaatgtcaagaaaccaacgacgtgagtatcctcttattaacattgccctttctctccttccctttccacaggtcagggtcgatttccttatgtactgttgctgcactcaagattctcccatcccacctctgtgttttgaaaaacaggctacttttcagttaaaaaggaagacatcagagaactcatactttgtcaatttgacagtctctctgctccttggatgtctaagatccacaactctgctgatttctgtgggctctggagtatagtttgagtttatttaaattttgaaacttctcttatgggctcaaaacgttttcttttcctactcaatattttttatcttagctaatgctaaaccaaaaacttgactttgatcctatggcaaagaagatactggggcgaaggtcccttgcagtgaccgaccatgaaagggtgtctttcctaagtcccttctcatttcacttagtcatgaggaattctagaatttggcctagcctggaaattttgaaaagagaactcatgagtattcagaagattaattataagtgttttatatgttacaatataattagtgtctttaccctacaccacatctcatcccgttaatgttaaataatttactaaacactgtacccatagctaatatttagattgtacttacctaaaatactataagtaagactgcttagaatgtcttggtacatagtttcctgaactgaagattattgaaagagacttctatgtaatttcttaaatttttttattttgatgaattttgaaaatatacataatgccatttttggtggtgttctgctttaaaaaatccaacaaacatttgtttcattataataccaaaggctaattaacactctattccctacaccttcctatttttgtattttatttgcctgtatttgagatttaagattttgtttattcaattaaaagtttattctttcaatcgaaaattagtcagttagctaatatggcagtttaatattgaaatgatttaacaacaagaaataaatctaattatacaattacttaattgtgtattttttctaaattacatatagactaatagatattacatttcctcccaaaggataacacttatggatagcatgaacatataaatcgatctatataaaagtgaatttaaattacattttgaatcatctataaaaataaaaagaataattatttcagatttgcttttatctttgagcatatctaataaaaaattattctcatgcaattctttttaaagtggcttaaatttggaggcatcaagtgggagagtgagtaactcttaggcttctcactattattagtaacttattattattattattattattattattattattatttcacttgtttttttatttttttgagacagggtctcacaatgtagcttgggctgtcctggaacttgctatgtagattaggatggctgcaaactcatagagatctgcctgccgcatcccaagtactgggtgtgcaccactacttctcatcatatacttcaggattgccagtattgtgacaaagaaataagggagtgcccactgaacccaaaggaaaatgtagatagagacaaaggtaacaattaaatgtatccaaacctcaacttaatggagaaatgggtcatgtaatctataagtaatactttacaattataaaaacatttaaaaatttaccctgagatataacttgataatgtctggaaagaaccatcccaaagactgtatctgaggaaatgccctgtttggggtgtggtttcaggagtgctgggatccctgaaaggaaagcatggtgttctcccccagagtcattggtagttagtatggaggactcaggaaggaacattcagctcaaagctttcttccatggagaagctgtactgccatgcacttctcacatacccagcctcagggggttccagaaggctgctttaatttggtaattctgcaaggaatttctatacatttaggaatctcacaataataacattaatcacaagtatttcataatctgtaggctctttatatcaaagagcatacaattcctggtgaatggatagtaacatcttcccagaaacacaaaatctgaggtcagttactgtaatttatgcagaggtgccattctgtgtgtgaaacaaacacataactataactggcaaataccatgtctcttgagtagagatgtagacttagccataccagagaaatactctgaggaaccgtccatgaaagataaacaggatagagaagaaatttgatacatagccagttcatgctgaggcttgccacatacaaaggaagacagagaggaaggaagaccagatgatgcacagcagcatatggagaaaacatgagttactggaccactgcaaccacaaacaagaaaggcatttctaccaggagtgaaagtaaactattcagggacagtacttaagtttgcaacagcaaaaaatgtataagggagactaatatattaggttttaaagaaaattgcataggatttcaatttctggcaaaatatggaagactaaatgacaaaataaccgtggtaataataactttatgacagggctaagttttctccatcatatccctgctgcagccatcgaaggtctgtctcagagctgaccccacaatcatttcttatggaatgtccctaaaaaaattgcccaaccctgtcctagggacttgaggtcaagatggtccagctaactgccactttttgcttctgttaaactgcttgcttgctctacttccctgacagctgccaaccaggaaatgtgttttgtttttgtttttgtttttttttgttttttttttttgtattttttttttctttaaaagatctctgtagaaggaagtttgggctaagttgtgagaactgtttctgtacaggaatttgctagcaggcttaatgaagactctcaacttcagattggttttgttgagtggtccttgggatctttaccccacgacagcttggggtctataaagcagcagaacattttagcaaaatgcaataaacatatttgtaaaagaagttgtgaacattcaagaaaaagaaacactggagactattgaggagatcactgaggatggtgagggaagtgacttcccaagtggggaaagtggcttctctacttggtggggttttggatctcaagttgctggacatatattttaatatcaaaaggtgaatctcaaccatgtacagagatgacataaaagatcaactgagtattaccacatgtaggtacccgataagaatggcccaaataaaaacagtattgggcaaagaacaaccataaggaaatgcaaaccaagccacctgccagcctagaaaggcttgataaaaacattgtatctgtcattttgacttgaattccaaatggaagaatcaaaaccttatgattataagtgtcctcaaatgggcttattatgatactcttataaatttatattctgtgaaccaagaatttataaaattgattagtgcttgtcaatagttcttgttggttaaaaaacagtaaacatgaagttactttatttttcagaatttattttttctattttatgcatatgaatattttgtctgcacatatgtatgtacaccacatgagtgcttggtgcccatggagatcagaagagggcattggattccctgtggctgaaattacagatggctgttgccataatgtaggtgttgaacctgggtcttctgcaagagcagttagtactcttaagcactgagccatctttcctcagacaagaaattcttatagaggaacactgtatcaaccatccctttggtaatctcaatgtgttagtcagggttttctaaagggacagaactgatagaatgaacacacacacacacacacacacacacacacacacacacacacacacacacactgcagttccaatctggtgtcaaagtccagagaagtcctagagaactgccaatcttcacttttctcatggaaataggtttgaataacagtgaacagggtaggtgagtttgctagcaaaagtgagagcaagcaaacaaaaccaaaaggcttctttcatcttccatgtccttttatgtaggccgacaccagaaggtatgacctagatttaggataactcttccaaccttaaaggattcattcaagaaaattcatcacagacctgctcagctgcttgggttttagttgactccaggtgtagtcaacttgacaaccaagattagtcatcacacttactataaagtgcaagtgaacctgggtttataatccacaattataaaacatactaggaaaaaaaaaaccagaccaataattagtaggttcaaaaaaacaactgaatttaagaagcttgaggaaataaagttaactttaaataactttaagatgactaaaatataatccatgctattacatttcatgagacaggaaaagaactccaaaggaaccagaaagcaaagattcagtttctaaaagagaaggatgctcaggcagcaagcttcctgtgtgcaccagtaaaagacaaaagtgttacaaatagcaagcatgaaataagaaataacacaacaaatataggtatgtctcctaaatttggtatattgaagtcaatgacttagctgagctgtggtggcatatgccttaaatcccagtactcaggaggcagaagcaagcagatttccaagtttgagatcagcctagtgtacagagttagttccaggacagccagggctacacagagaaaccctgtttcaaaaaaataaactaaaaaaggttaattacaaaagtagatatatggttcttacacatgacatttgtaacatgaaagtttggaaagtcgaatggaaaaagtattaattcaaaacagctcagtatagcttagataaaataaatacatggattaggcatcttgatgggtaggtagatggaccacttcatcaagattggcatcttaatatctgatattaaatttttatatagccactttcagaaattatggccaactgattttatgttttcataatttatttatttatggattgatgatttgtaattgtatatatttgggggtataaagtaatggtctaatttttaataccgagtgaaatgatcaaaaaaagctaatttgcatctcagttgccttactattaaacatttttgtaataataacatcagaatttgttctcaacaattttgaattgtaaaacactcaataatttgctttgtctggaattattgattgtttatacaaaaatcaaatttgttcttcctgtctaactaaaacttaatattctttgatcataacctccatccctaagcctctggccatcactattctctatgcgtttgcagcttcagttgttggagagtccctacatgagggagattatagagcatgtgtgtttgactgattttacttccctggctccatctacactcttacagataaccaaacctctcccccgccccccccccaaaaaagcagagcattcttctcttgtaaactgtattagctattttcctgtggcggagacaaaatatctcatctaagcaactgaaagaaataaggttcatttttgacttctagttcaagaagaagtctaccatggtgaggaaggcagagagtagcaacaacatggtggcaagtgcctgggtcaagcaacacacagagaggaaggctttggtgagctaccttctctctctctctctctctctctctctctctctctctctctctctctctctctctctctctctttcttatgcaggcccaattccagccacacttagtgttagtcttcccatctcaagtaacctaatctagataatcccacacagtcacgcccagaggtttggcttcaaggttatcccagatcctgtcatgttgccaatcaatgcaaacaaaccatcacatttttatactgcttcttttaaaaaatggattcattcattagggtatgtaggctgattccgtgatgtggctctacgaatagcactgctatgaagctgggagtgcagaagcctgccctcttaccagcctttaaactttattgtaaagatcttgcaaataaaaatcacatggtaaaattaacctgaactcaaatctatacatctgaaatgaacttcagtacagtcagaatatccattctgaagctgtggagttaaaatttggattctatattttcactatcaaatacatttttatgcgcttatctaccacccatatctgaaagttccatgacagagaactttgtattgtcttttacaacttgtatctgtctgctacctgcatccagtccttcctcctcccctaacaggtaccctttcctgttctcctttcttcacactgtaccacacccacgtgcacatttttaacacaacagatatgaaagtatgtgatatgcagatgagggagaattgcaggtttttttctttctgaggttgtgtggcctctcattattatgcgttctaagtcccctcattttcctgaaaactttgcgattttatttttccttggagcctgacagtattccattttccatctggaccagattttcattatccgtttgtctgttggtggaaagctaggttggttccattgttcattgctgctttattcactatagggagaatgtgtttagttctgcttcatccttagcactcttattttaaggcttcctggcaagtacctagaaatgagattgctgaatcatactatttctagattttaaggctcttctttatactattctgcaaaggtgacactgatttacatccccgccaacagtgtacaaaggtttttttcttcttcacacccccaccagtaactcctgcctgtgtcttcttgacaatatccattctgccaggagtggaaagattgtggttctgatctgatcccattgtggttctgatctgtgtctctattttcagcaacattgagcatttgtacatgcatttatgtacatattttacatgtatttgttaactctttgtgtatcatctgagaaattattattcatgtcctctttccatatcctttttttcaacattatctttttattgattctctgggaattttataccatgcaccccaatcacacttacttcccagtccttccatgtcagcactcccacccttgtgacctctcccctcaaaagtaaacaaaaaagtaagaataaaaaataaagacaggggaaagtttattttgggttatctgtaactcactggaacttggtcaaactctcagtggcctgacttgtaaatagaaatgagttcttccccctcctgcactaccaccagaagccataacttggggagagctacacttcagcttccacatcagatgttttgagagttatcttgggtagctttctgtctaggcttttacttttgaggggttagtgtagggataggagttgttccagaagcctcccaatgcccctgcctctcaactgcatctgcaatcattgatatcacaacaaaagtagactctttgatcttcatcgttagtgtgagcatggatcatgggctttcaaacaatttctggggacagcacagactgtgaacacagtcgccaactgcagtagaatcttggacccagatgtggccctcagcaacagtaaggacctagacaaaatcatggactcaggtatcagcacaggtcactccaataaatatgaccctcagtgacatcacggcccacagacatcagcatggcttcaggtggcagcacaaaccatggacaaccacatggcttttggttgcaacacagaacaaagacatcaacacagacacaggctgcactaggaccagggattcagacttgaccctcaggggcaggatggaccatgagcggcaatatggtctcatgtggctacaaagaccattcatatcaatatggcccccggaggcagcaaagcacaaggacatcacaaaggctccagtcagctgcgcagactgaatatgtccacatggatttgagcttcattatgacctggggcagcatcatggaccacatactacaacatggcctctgacagcatcatggaccatggtagtcctttgaggaggtgtgatccagaaagtgaaccattactcatcttgggccttcactgttacccagaacctgcagctgcgtggagtgtttggtggctgagtttgaaattattctatagtccaggcaggccatgaatttataatcctcctgcctcagtctccaaataactggaatgatagacctgcatcaccaggcttgggcattttagctttttgacaataactatgggcattaagcccttcaatcttgttctggttgggcacctgggtccatgtggtgcttggaatgttagaggggtcttgattttattgatatgataagaaataggcagttgcataggttatcttaccctagctgtcaagaactaacatttccttgctatgtaactgatttgcgtggttatactaggaatctaaaaacaaccaggcacaatcttacaatcctaccttaagctattgtgactatcttgcgcacatgccacagcaattccaaggatgtgaagtcctttctgaacttactctgccccagctcttctttttctgctcttccaagatgtagacctggttcatgcaccccacacatccccgggtagattctatattatgctcccacatatgaccatattgcatttactagtgatttccttaggttccctggatttttgggaactggttttctaacagccttcagggtgggttcatttcacttgaggaacctagctctaggaatgtagggtcctgggctgcaaaagcattgtcttcacaatatacagcctgagatgggcacatgtgcagaatgaggttgttaaagttttcatgatagtatgaacgtaatatatagaaaaaaataaaatacaaagagtaaaaaaaaacaggaaaattaacactataatgctgttatgaacacactacactacaaacatagtcaaatgagtttgtgtcttttcacaatgtagactttattgaatagcaatacgttcacaaggcttatagtttcggtgacaggaactgttagcctggctgaggcaaattcaaattctttactccaatcttaattgctaatattatctcccatatcacacatcaccagcacacactgaatatgtctatataagtagatacagattccagaattaatgtgagttaaagcagccctagcagagttaaagaggttttagatatgggctgagaaagactctatgtcaataaaatagtgaactagaccagtgccaggagagggctgctggtggagctgcagctggtgctgctgatgtcagatgtcagagcacagctgcagagttcagctgggaggtataaggtcaaagtaggtctggagcagaaaatggtccagggctagaaaatggagggtcaggtccatatgggtaaacagggggatggacatcaatatcaggagactgagaccagtagaggagtccttgagccttgatatacacaccaaatatcagatgatgggttgttctggggccatgccattgcagtgtctatcactttgtgtgttgggggggggtagtgatacctgtggtggtttgaattaaaatggtccccatgctggccatggtagcatgtgcctttaatccaatcacttgggaggcagtggtagatggatctctgtgagtttgaggccagcctggtgtatagagtgagattcgggacaaccagggctacacagtgaaaccctgccttgaaaaaaaaatcaaaaaagaaaaaaaaggaaagaaaggaatgaaaatggccctggtagactcatagggagtggccttgatggacgtgtggccttgttggaggaagtgtgtctcagagggtgggctttgaggttttagaagctcaagctaggttcagtgtcactctctcttcctgctgcctgtggttacagatgtagacctctcagttcctctccagcaccatgtctgcctgtgtgctgccatgcttcctagaacactgataatggactataaaacagacctaattaaatgctttcttttggaagagttgtgtggttaaggtgtctattcacagcaataaaaatcccaactaagacaacaccctttctttggttgggtgagctcattaagtccttggatccagttcccttgatttgtttttgctatgtccatgtggccccatgtcaccaattctcccagtacacttacaggatgcctctttttctattcccagggataagacacttattagacaatgctgaatgaatggttcttggcagatggtgcagtttctgagttcactctgagcctgcaatcatcgttcatcctcaaaatggaatcaaaaactgcttgtaaaatggagacactcatggcaaagtacagcttgaaaaaccccagttttatacactatggactagggaagatgctattttcaacaccaactttcaaagatatactttaattcattttccacttgaaatttccatgcatcttaattacaaaataaataattataagaaggaatgtaaccaatatgcagacgattgtacttttttatgatacaaattattattattatcctcactcataaagattcttaaacacaattttaaaagctcatgcacacatgcttgtgtttgtgtgtccacaggtggatgtctgttatgtgcaggtgtactttcctctggaatgccatttgcctcctttgagatcaagtcttccattggcttgttgctcaccaattaggtcagagtgactcttcagtgagctccagaaatccttctatttatgtctccccagcattgggattacaaatatatgccacctcatctgacatttctacatgtgttctggggattaaattcagatttgtatgcttgctaaacaagctctttactgatggagttatctccccagctttagcaatttaacattttaatgccatttttttatttgtgtttctttgttcctataaattttacattcttcttgttgaaatgtgacatttgtgaacatgaggtatttattattattattattattattattattattattattactgtgtctgctatgtggcttttcctggggtaaatgagcaaatgtctattcaccctacatagggtaccaacagcagaacaaagaaatagctcctctcaagtctagcttaatgaaaagtccacataaatatggtggacagccctgaaaactatagtcctggagattcttgatggaagctgggcagattagagtctatttttctcaggaaaatgttacttcttatgcagcattgggggagatctatcagacttctaagtttcaggaacatcctgagacttacgaggtttatttgctttctgagtcttattattctctctcttcttccaggaagtaatatttcaatttggaggaaatagctacataatagtatcagtcacactttctgaacccaacatcttacattttaaattaattctataataattataaacactggaattcttaaaggcagtgtaatttatctttgtgtgaagaatcacattttttagttctctaacataagtaaatttgctctgaatagttttaaatattcaggatcttatttatttaataaagttgatctcccagttttagaatcagaacttataatcatttctttcacttgcataacagatacaatgatagcatctagctcatttatgaggattaatatcttaatacatatggaaagtactaagaatagtgtctggcacatatcattagcattattatataaataattcttttgaatttttatttgttattattattattattattattattattattatgtgtgtgtgtgtgtgtgtgtgtgtgtgtgtgtgtgtgtacatgcacatgcctgcactgcatttgtgtggaagtcagatgacaacttcatgaaattttttcttcttcaatctttttataaaaatgacttatttttaattttcttgtaggtgttctgcttgactgtatgtctgtgaagcatatatgtacctggtacccttgggcagtaagggtttttactccctgagcaatcttgctagcttagtgattctttaaatgaaataaagtgattagtactgtattttaagcaaaaagcagagggagcagttatagaaggagacagtcacgtcaactttgtttccttacctgtgtcaatgtttctttttctctgaagtgttcaataaccagaggactgtgtgattgaaggttgtggatctgaagggtcctcagcttgaccattgcccacagtggtacttgtagaattgcaaggtgaaagctcaacatttgcttcagaaccattagcagtgagctgagtacattggtgcttctaagattcttcagtaccgtccagacagaccaggattgaaataccatagagaggtgtcctctttcgatgtttagtttgtatcctcaagggcagaaagtaagttgtgtattatagagatgaattagatgtcttagcctctccctaggaaagaagaattcacaaagaagtaagcacaccaacagcactgttgtgttcctcctacaccaagattctttatataaagagtcagccaataggctagaaggtgtctaagcaaaccaaagtgattttctacaaggcacatgggtgttttaattgccttcctatgttttagaagtattaagagatctttcaatgaagtccaaagtatagcaaaacataatccatctgtttggaaagcagccatgcaatgagatgagcgagtaaacattaccaccgagcactgtggatcccagactttggggaatgtgagaaagactgaaggatgtgttggcatcatctaaagttaagcccagcaagaagtcatcactttccagaagttagtctccccattgtgagccctgacaatgctcaaattttgctaatcatttttaataattatattatgaatgtgtttaagcagagccagtttgaacttgtctgattcaaaagtcatcaaagaccgtgagtcagtatatgtggatacaaacacaactttgtgttggcttgttcttcagaacgttttttctgctgacaaattatgcacactgaaaaattccctaaccatagacgtgcttgattgtgaaaagtgtgatcgtggttgcctccgtcagcatttgacaaaggacatgaaccataatttggaacctgaaatgtaaaccttgaaagaactgagcaacttaacagatcaagtgtaaacaatgaagtggtatgaacgagttaagtctcccccaaatgtcaggttccatggaagagtgctttctctatttgatctgtcactggagtgctcaaaactgacactctttgagcataatatactttgatgataaactagattaactttcccagtacaactgaaaggccacctgttgccagaatggccacattcctcgttggctgtcttgtagctgtcatcgcttcaatacaatctgcagccgacatgctggaatataatgaatatgtcagaagttggaggtcagccatccaagtacatgaaaacttggcttgcctacagtgtcagtgtggaggcctcccccatgctccagtgcagaggatttctgcatcacttgatttgtttgcacagggtttgttgctgttggatgggtgctcttctgagaggctgtcaaacagcccattcaaatattttcaatgtggaaaaacagcgcttccggtttcaagctcttcaaataatagggattgagaaatttatggtagttagtggtgtgtgtgtgtgtgtgtgtgtgtgtgtgtgtgtgtgtgtgtgtgtgtgtgggggggaggagttctgctgtggctgttactagagaaatagccaaagaaacagttcttactgttttgactggcatggaagtaggacctgttggaattgcagagctagctacttaaagtctttcaactgtctcactctgatactctcccactgactctagacatccaatggggttggtccagtggacacagatgagctagctctaggctatgaactgtagcactgtgtattaagaagtttcacatttatgaaacaaagaacatttgccaccacagtataaaggaactgtgtgatgatctctttactcactgcatactggttcttcccccttctcctcagtgaagtcttctagctgacagggcctagagagaagccctctgaactcttgcttaacctgattaagaaatctttagttccataaagagagtctgagaatagacttagttttttggtagatagatgcttgccccaaactgttaaaggacaactaaaggaagaattctgttcttgcctgttactaggacagtttctcagtcttggcactcttgaatctcctattgggtaattctttgtttccaggtagatcctgcacattgtagggggtttatcatcctttctgatatctacccattagatatgaagaacatgtactcagttatgacaatcaatacactttcagatgccaatcatttcctcacgaccattgttcttagttgagaaactaaggggacattgagatcttaatgaagccaatcatatgcttatgtacatcttcctggttttacttccttggttttaacatcaaatatcaactggaaaagagtgggaggtttatctcactgtatgctctaattcaaattcatgtgccagaagagaactggttcaggtaatttggtaatcagaacagtgataggcagagaggggtcagtcttacttgttgaggctgttgtttcctgttaagtcatttatgtatggtattccttttgtccttaacaaaagaagtagttaactacattattatcctaccctcttgtaggtgaacacagtacagctgggagcatgggaaatgattttctgagagtttgtgcctagtttagtggcagagctcaaatccacaccctggtaaccccacctggagcctgtgtggtgaattatttacacacagtaggctggaccacaacagaaaaaaggcagttaccagggatgaacagttatttgtccccaacagctgacacgcaacatagttcattgtagcatttctacataacttaggcccctgtgagtcacatcttataaccattttttatgagaacaaagtggcaaatagctaatttaaaatcattcctgtcaaaagaagataagaaaattacatgtgggtttgattaaaaaaaacattttatagctcttctaaaatacttgttaaattttatcgagctgtgaccttataaacttggacctctgatgagcttcatgctcagtagcaatgcaaaatcccactcattctcactctgtgttcccacagtgcttagattctgctgtttgcatccatgatctcaaacatgttccacatgtgttgacagggaggaacagctgactcttgtgttataggttttctatttctccaccaggaaaggtttttaaaaatagcaaaatggctaatactaaagaagattggacaaaaccgaaagaaagaagactcttcaatgaatctacagtctggaaaaatgtattttcttagtgcaaggccaaagcatctttgtgtccttcctttcttgtaccccctctctattctgactcttgttactgcatccgtcccactaccattcccctaaacaacaacgaaagttatatgtgagggctttttcctcagtgtttcacttggaagtctgtgcattgggccattcctcatttatcctgggtccatactcagcaaatgctgcagctttaggagcagcattaggaagctgagcaggaaatgagggaagaaactctatctatcaggaactggtaaagctttcattaaaggaagggagacatggaaatcctgggattgttattggcagatttcactggttccttgtaaagatatctttttcatggaggaatctgaaacatatccacaagtggctagaatagtaaatgaactgctgcgtatttggcacccaatcccaagaatcaggaaaccagggccaatcttgttctatacaatatttgtcatttgtgggggtaaaattacctgttacatttagcagctctcaaacacatgtactgggcttcttaagattctgtgcattgatctctcccaaggctacactcatctcaaggttctgtgaattgctggtttttcaggctgacccagtagatctgggcaactctcagtttctcatgaggaattagttcagactgccttcttatctctttcataggggcagctctgtgcagcagctcccttcagggtggcttgcttcttcaaagtgtcccaagaaagggaacaaaagagaatgtcatagtgtggataaggtgacatctcatattcttattatattttaatccccagaaaaaaaatcctcccattcttgcccaccataggggaagtgacagcaaaccaaccaggagacagtcatctggggcctttctagaagccaaacctggtaaccactctctattcacctcttctttccaacagtcttttgaagcaaacctcacatttcacaccatgatttctgttaaatgctgtaacatgcctccctgaaaggcaaccatacttcagtaggctcagccccagagtgccattaacacacctgaaatgtcagaacccaaatatgtttaaatttttaatcagtatccaaattttaagttgcctcatggatatctcaatgcattaagattgacacatttcaaaaatgtctttgaagtcacttttaatcaacggtttctctcttctcctttataattcatttgaagtgaagaaacgtttgtttgacccagtttcctgtaatctggagttcgcctattggatcctttggtaataacttaccacatcctttatatttctcataggttgactttatgtgtatatgtgtacatccataagatgactttggatatcttcctcttttattgttaaaatgtgtattattattattattattattattattattattattattattattaattagaaaatgtgcatttctgtgtgaataagtgcacctgagtgcagatggccatggagtcctgaagaaggggctggataacctgaaactggagttacatgtggtttccagccgcctgacatggtgctggcaacaaactcaggtcctctgaaaaagcagtatatactctaaactgctgagccatctctccagcccctcttctcttattgtttttaattttttaaataagacctgtcactcaatctagagttcatcaagttgtctatgctggctgaccactaagcttcagggatctaccatcctccatgacctgtgaccccagcctgggattacagttgtttgcagctgtgcctggcattggggataaaaactcagcccctcctgcttgtgcaacaggcacttcagcaaccgaatcatatccttagcccaactcccctgtcttttttcctttatcattttaggcagggtctcacactgtaggtcaggcagactctaaatcccctcctttttcctgtcctggcctcctaagtactggactatgtggatgtgatagctttctgggctgataatcatagatttttaaaataggattgtattttgcaaattgaaataatggtatctcccagcatcaaaggcattaaggaagttctcagacggaatctgtgacactactgcccttgctcagcatgtgcctgctagtcttggatatttatgttgtcactttattgagttatatgccttgctgctatttcgcatgtgttccatttgtcattttgcttttcccaaatgcttatgtgttctgcaccaaaagaaataattgtctggtgatattctcagtccttgtaagagaagtttcttttgcagagagtgatggttaacacaaaagctaagtggcacaagtgctgagaataagtgactgtcgaatgctcagccctaagcgtggacatctatgctttccccttcaaggccaagggaacattttagaaaaagggatgtgttctagattccttcctgttgctgtgataaagcactggccagtaacaacttcgtggagagaatttatttggcttatacttgcaggtcacagtccttcattgagagatgtcagtgcagaaactcaaccgttaactggaagtcagccctgcttgctgttccatgactcacagccaaggaagtacagtaggagccatgagggatactgcctcctggctggatactaggatgagggagaaagaatgtaatagtcaaagtatggggagaagtgctatggaatattatagtctttcgtacatgacatggtgattgcaatcactgactatagttaccagcacaggacttgcaaataaacaaaaaagacataaaagtagggtaggggttagctgggaagaagaagggagtcatcaggagtgggaggggagtaatagggggtaatagaggactggataggattacaatgtaaacgattatagaaaatattttaaaaatcaattcaagttaaaaaaaaaaagaaaaagtaattgcttgtgcaggaaacagaatgatgcagaaatgtgattcatttataactggaccacaacccatagctacattaaccatagctagcccctcagtattcaagacagtaaattagaagaactatgttttctggaaagaccagagaagtattcctatcaaccctggccaattggcaatcttggaagaaaccttcgcagttaaaactggcattctctttctctctgtgtctataaaaataagttacaataagcagtttcagtgagtacaaaatgaaaaacataaatgcatttcattagtttagtcttcttttcttggtgatagttaaagtaatcatatgtttacaactaagttatcaaatttagtggaatatgttgataacaacaaacaactgaaagtgtggggaacatcaagaaattgcatcttattgcactgagttaagagaatgaaggacccatctttcttctcccacatatatcctttcttgttgacagttctatatttcctggatattaggcccatatgtttgaactaaccacgaccttagtaataactttgctgaaaagtgaaacaactatacacttactattcccccccccatagttacatatccttcagtaacagtttgactaaacacaagcttttatgcaactaaaatccagatgttgtcttgggtctacttggacatctctgtagcatcctggagcctttcactgcaaacctgtttaataactggcttctcttcattacataaggagtagaagaacaactgcaaaggccagtattccagcctttgaagcagttgctgtggttttaaaagtttcactacatttttcgctctcttaattgaattacctattgatgaacattgaacagtttttaagagtcagctgggaaaacaacatctacacatctcattgaacacagagaagtcactgtgatgcctaacaagagccttcatgagttcatggtacaggaagatactctgcatgctatcagaggagaaaggtagacaccaacctatctacaaatgcttccatctacaatggtgacttgcctacaagatagaatggtgaaatagcaggataaaagttgtggaattaactactatctgattggatttaaggcccattcctgacactgctcaggtggccacgaacttaagactagataggctattgttttaggggaaaataaaatactattgttctgtcaaaggaacacagcaatgaatgacccctaaaaacatttgctatatccatacatcagtgtctcactaatccattatcagagaggtttcctcatgcagcgggaactaaaataaagactcacaactgcacaatgtgctaagatgtactcatcagacccctcccctcggcactcaggaactctgcagaagaggcagaaagattgttagaggcagtggggatgggagacaatggaacagtcaaaggagtaatgcacatatatactcacagaaactatggcagcatgcacggggcctacaggagtccaagccagatagggtccctgcgctgacagaggaagcagacatgagcctccatccctagcccagaggctactaccaagtgtcaaacactcaaaaagaaaaaaaaattagttttctttaatagagtctcattggatatacaatcctcacttaaaggtaggccacataccccaaagttgttactacaaaatgaaatgactgttatttttgtttgtttgggcatatttttaccttgttggtttttgcttatatattactatttctgattttgtgtttatatggttgtgtatggctttcttatgctttttcttttttatgtctttttaaaacttctttttcttcccttcttcctcttcctcctcctcctcctcctcctcctcctcctctcttcttcttcttcttcttcttcttcttcttcttgttcttcttcctgtttttttcctaaagagagacagaagaaggtgaaacttgacagaagctagagtcaatagagaggaaggagtctcagttgaggaaattcgttcataaggtctagctgtaaggaattttctcaattagtgatgagttggggagaacccagcgcattgtgggtggtgccatccctggactgatgatcctgggttctataagaaagcaggatgagaaagccatgggaagcaagccagtaagtagttcatctccatgaaagtagcacatcaagccagtaagtagctcatctgcttctgcctctaggttcctgctctgcttgagctcctatcctgactttcttttgctgaagtgtaaactgaatgaactctttccttaacaacttgtttttcagtcatggtgttttattccagcaatagaaaccctaactaaaacatgaggtgtggagctggatgggtaggaatgatctaggaagagatgatggaggggaaacaatgctcagaacacattgtatgaaaacttattttcaataaaaaggagtcatctgtggttttctgattgcttgatgatgatagagcagtgaaagccatctgagattcaaggacagacagacacgcaggagaaactcaaggttttaaggcacagtaaggtgactatactagctacttcatagtgtaaatgagcaattagagggggttgtgaatgttccccgtacaaaggaatggtaaagatttcatgtgatgtttgtcagttacctgagttggtcattacacattgcttacatgtattgatatgtatttctcatctgtataaatatgtgcaattattgtgtcaattaaccactaaaaagagaaaaataatacatatcatcaaattgtgtcaattttgagaagcacatgatcattctaagaggtttatccatttctgctacttttaaccacactatgtagggtgtgacaatattctacaaagacaatgatcatttgttttccagttcatttgagtatagccttgtcaaaatcatttcaaatgatcaccatttaaaatgaggttcaaagtcatgcctggctggcaaggtgggcgtctctgcttagatgagactcacacggttctctaaccttctacacacagcctgaatggcacatgtgccgtgtgccagcactggcttccctgtcacaacttcctccactgccaagcttctcttggcaccgattagaaattacatacgaacctgagatatgttaaaatatgaaaagttctcatctcagtcgatgaaatagggtaataaataacatccactgggtaattagagtgctctgcacttccttttctcatctatcttggtctttgtaattaccacagccttacctgttgatgaagaaacaggatcttagggaatttaagtcaattttgagtttgaaagtacatgttttcttcactcccacgcttctagtcccatcaagttttactctgttaaaggtttggtaaaaccatctgtcatggggacactgtctgtctttgctgtctagctagtggtcactagccacttagacctgttacctacttcaaatgtggttagtgtaatgaaataacaatattttaattttattttgtcttaattgatttactattaattaggcatgtgtggtagtggctcccacaacagtcagtagacagaggcgggtacctcctcaggaaaatttgcaatctaagcagtaaaggagcatagttcaccatttcttctggcaaaacctctctacaaagagaacctactctggggtcatgacctctttgacataaagcactcctctgctttaacaaaaagtgccaagtaggacaattattgcaaggcatcgtttactcatgccatagatgtgtcctagatggtctcctgagaccttattttgttgaacaaagtcattctctacatttgtaaaacactatacattttactatcaattttgtaagttttatctcctgaatctttccaagtcagtttgcatggaaaggagaattgatataactctccctatttacagagggaaagactgggacccagagagcttgtatgagcttgggccctgtacttcacctgtgaagacttacctgggatttgtatctaatcttctagcttatgggttttgtgctttctttttcacatcaaggaaccatttctctaggcttggactcaaatgtgtctaattttaacaataaccaaattctgctgctggaaactctgacctgagtggaggtggttccatgggagcagctgaagagaggtgttatcatttgagtaattgcccctttcagggatgaggtgctaagacagtggttttcaaccttcttaatgctgagatctttaatacagttccccatgttgtggtgacccccaaccataaaattattttcattgcacattcataactgtagttttgctgttatgaattgtaatgtaaataactgatagcagggtatctgttacacaacccatatgaaagtgtcgttcaacgagccccccccccttgcccaaagggattttgacccacaggttgagaaccactgtgctaagtgaaggttgggaatcccgttcatgtgttctcgatgagtaatggggaacatgtctgcatagttgcagcagtgctaatcccaaggctgtcccaggtgaccatgtgaacaaatgttaagtctgtagagagaaaaccagactgtcttaatcctaacttgtcccagggtattttggttggttttaagtacaattctttttgtgattaagtgggaaagggaaaacagatggtcacttggtcaaaattggtttttaagtgaaaatggacacaaccccctttactaaagcactgtgcttgactaaatgttctaaggtagggaagctggtgctggcagtgaagagaatgtgtgtgtactgtcttgcacagcactgcttacacagctcacttggaaaaagaagcccttgattctcacagaagtgacacctgtaatgatgtcacctgaaacagtagttacagcttctctgggcttttgtctcatcaggactacagtcttcgtgcctagctacagtcagacacatgcagagcaatactggttttctggtcactgtatggcgaatgagtctattggaagttaaggaacagagggtgagttccccagaaggctcccactgccttctcctttcacttatttttagatatcaaggatgtggagaggtgaaggagttagtgactccatgttcttcaagtgaggaagccatctctctcttatccatctgtttcccacaacagcaaggaccactgtgaggttttgtagggatttccctgattcctgtggagaaaatagaaaaaaatgcacagaaaagcaatacactgaggatgcactggaagtatccattggacacactcaagctgttggtagagtgccagagcacttttcccatttcagccagcaagattgtgcccctttgacttccatcctcccaggagggagctgggaatgagaacctgaccctcacattctctacaggcgtccttcttgcttccctgccctgtaatgtccctctctctggagaagccacactctacagatggagggaaaaaccttgagtcatcttttcttccagaaaagtacaagatttctgttaccatgatgcatcatatgcccacagttttggggttctgtttgtcttaaagcagagcacactgagtttcaggactggtgctagttaagacttcagtttgaaatcttgtattactttaaaaatgtagatgatttttcttggatttctgaagtctttcactgtatgttggcttgaaagaaatttcttctcttttatttttttctttgcttatttcacgtagccaggaacaagggagacaatgtaagactagtgttttttatgatgtctctttaaaaatatcttgatattatggttaatagtctgactatttttcttttaaatatatacaggttggggactcaataataccatgtatatgccttcaaaatttactaacacaaatcatgagtggacatgtgtagtttgaataaaatttcttccaactagagtgtttcctagcatccccaactccaatgctgaaattttggtaaacagaggggacaataaaaaaaaatatgtacttgcggtgtgtgtgtgtgtgtgtgtgtgtgtgtgtgtgtgtgtgtgtgtgcattcacacacacatacgtgtgcgcacgttcgtgtactggaacccatgcagacctaaattctttagaaaaagaagcaaccttgaattttatcattgctcagttgaacattagctcagaaatcaagatctagatgctgattcatagatgtttaattgagtttattattagtgaattaattggccccccaaaaaatagtctgagaaatgggagccaggagacacagccagaataaatggcttttcctgggatctggctttcctctgtggtccttaaggaaggtcctttctgcattattcagtgtttttggcttatttataaatctcagaggaaatgctgtgcaaagccacagatatttcaaatgtcactgttatcattgaattactccttcagactgcaaatgaaaccaggaatgtttttgccatttaaaacttgcagtagaagagtgaacaaaacaccgagacttcaaggttaagcagatgtggaaaacatatatccactcagcttcttttgctaatgaaagagaaatcttaataaacacagcagattactctttttcattctcttttaatgaatgcttagttggttgtcaagtctaagagcagaattataggagcatactcatttttaagatctgatttatggatgtttaattgaatttattattaagaattaactgaccaaaaaaagttcccaggaatatgaaggaggagacacatccagaataaatggctttccctgggatctggctttcctccatggtccttaaggaaggtcctctttgcattattcaatgtttttggcttttgtcgattggctagaatgtatcttctaggctttaatgaatactttggtctatgtaatattggacttcagaaaccatattttattgagaatcacttttaatagttttaaactgtgcattaatctagtatgacttagtaacttaagctttgcatgagcacaccttgtttaaattctccagacctggtttctaggctctttaaggcagtgcttcttaacatataggtcacaatcccatgggggaatcacttaagaccattggaaaacacagatgttgacattacaatttgtaacagtagcaaagtaagttatgtagtagcaacaataattttatggttggagtccccacaacacaagtaactgtattaaggttagagcattaaaaagattgagaagcactactttcagggaatctttttcactttgggctatgtatttcacctttaagttataaaatgagtttttctgtgtttgcatcccagattcttatccctaacccttgggccaggaatttaagcatagggccaggaatgctacccctacactcttcaaccttctccctttctctgtatgtgcatatgggagggttaggggtggtcataggaattcatttcttcccctttgcatttttgaagatgaagaaaatatcaagtataatttaagattccagattacaaatgtggtaatattatttaatggcagtaatattaatatatgatgtttgcttgaggagatgccattctgaatttttgtttgttggtttctagactgactctcactatgtagctctgactgacttgaaactcactatgtagaccaggctggactccaagtcacagagatctatctgcctgcctctatctccacctctagggtgctgggattaaaggcatgtgtgaccacatctggctttttctaatattttgatgctattgaatttgagttcaattagaaaacatgcaggtattctgggtgatgggtcatagttgcacctcatttgtgaccatcaacaagtctttctctttctctttttatctttgaagaccttcatcatgcaggaaccacttgccttctctgctctgccacaagcacaaattaattaaatattgagtgattgatatgtacctgatagataaaatgtgccagcacctcctcagagaggttaccaatggaaaatcatcatttatactgctgatatatttttaattatgggaatttctggaaggtctctatactccctatttgaatcaaaaagataatatcatcatccaagaaaaaaacagttttaatttttgcattattgttagaagaataatctagcaagaagagaaactttctaattactaaattagaaaaaatgccatagctctctaagattctgagaaatgtatctgcaaagaacctggctgctttgggtggaaaagtaggattggcattgtacctgccacatggtaactaactgcttgataagtactaaaattttaaaactttgctgactcctaaaaccagggaagcatattctagtgtttcctatgctttttctactattttcactatgaaaagaaaggtttttttgtaagtctagatacaaatttaattgtagtgcagagtacaaggaaaatctggagggaaagagaaagggaagagagggagagagggagtagaagagagggagagggagaaggagggagagaggagagaagagagaggagagagagagagagaggggagagagagagagagagagacagagacagagacagagacagagacagagacagagacagagggagggagctgaaggtagcctacattgacattttggttgctgtcctgagatgagattaggcccaactacccaacctcccagagaaagcataacttaacattcatcttgcaacccactctatcattgtgccagctcatttgtctgcagtttaaaatgtgttacaaagtcaaaacttagaactaagattctttcacttcctgatactagagtgagcctagtgcatctgcttgttttggatcatttctaagcatttctcaaaggttagctccactttgcaagtttgtgttttgaagccatcaaaaactgtttctatgaaactctaccagattacttaagtgccattctaaaggctaccccagtcacctgaccatcttattttacttataaaatacccttttgaacctctccttctaggctctttccttatatacggaatccttcccacctggcctgtaaccaggtcccaagctgctttctgctctcatctttgctaattattgttttttactccagttacaggactgattttgaagagagtataagatgtgcaattttttctattccagaggctttggtggttttatttcttaaataacaatctttgactacctggcaaacactctttgatcatgtccctccttcatctctttatgggcactgtgagtgcttctgctttcctcatgaatgtccccaatcccgaacccctttcctcttctgtcattgtggaaaacctctttgaatatccactcccttgaggaacctgtgttcccactctccagacccagggacttgctgtccaatagcatgtggagaaagtcaataaaacttcagagatggaaaactcctcgctcaaactcatcttgttactggtgaggcagttttacatttaatgaaagaaacaaatggaagtgaggcaaggaagtaattggagattactggttgagctgcctgaatgtaatggcaggctaatgctttcagggatctgtccctcctaacagtttttggatctaaagtctccatgttgagttgagtcttagaaaaccctacatttgaacatggtaggcaagtagttctcaggagccctggattgtcctactgccttttgttcccagtcttttctattgttgttgctgattttttttccaggatggggactctattttgccctagctgtcctagaacatgctatgatgaccaggctgatctcagactgatagctttctgcctgcctttgcctcctaagtgctggtattaaatgtgtgtgccaccacactccatcttttagctatcaatcttgaaatggaattctcgttcacagtgggcatatcaacccagcatagcatagaattggttatctgggtgtagggcatgtgtcatccgtacatctcttgttacttgagtgaagttttgggttctcttgtaggccagtctaagccattcacttatttacttctgaggtcaaggagataggactgtaggtatatgtgggcaagaatagcagggctatatagagtaagaaacagtgtctgagaggagagtgatttcagtttattatattcttaaatatgcatacatacatacacatatatttgagataaatattcattttccagctgggcgttggtggcacatgcctttaatcccagcactcaggaggcaggcagatctctgtaaattcaaggccaggctagtctccagagcgagtgccaagataggctccaaagctacacagagaaaccgtgtctcgaaaaaacaaaacaaaacaaaacaaaaaatattcattttcctctttgaatgttacctgttcatatgtactttaccgtttaattctaagcgtctggagggcaactttcagttaacaatcaatagataccagaagaatgaagaaaccaccaggcagatgacaaagtagaacccaaggtcacaattttatttagttaatgtttcagacctttccaaatcctcattaatggttcttgatattttctagtgattaatataagttgaaactcagagaattatgttggacagactttaatgcttctgatatgatcaattaatttaaaaatcagacccaaacattacagctacaatttgcatagcagagatcaatataaatcgggatttttctgtataaaattacttttattagtaggagaaagtatcagcataattattactactgctaaaacaacacttgaatcttccattttgaaatttatggtaatttggcagtcaagttttgttttatagtcttagaaagcctggttcttgccaaatagagttttaaaaatcttcaaaatggaaaactgagtagttccttctttcgccccttttcttagtaacttcggaaaatctatgtaaataaccccactttgcatcctttgctcgaaatagtctacatctttatttaaagcagttactacactgtcaggatgaggcactggcagcagatgacacatggctacaacacggagggtaccatattgtgaacatttaatctgtgatgtttcttttaataaggtttaataaagcagattctaagcttttcttcatcagttctagaggctgtttagggagagggttaggcattgtggatttgcctttcaggcttaaccctaaaggaaacccttctctgccactgtttggcactagatacctttggataagttgcttagcacattgaaactcactctacagatctgcgaaatggaacttatattatcgcagaattggaaatattaaaggagacaatgtgataactggttagattacgtgacacctattaaagccttggcataaggctatgagatgtattactgccattatagtacccctggtgccaatcacttcccagagaaagctaagcagaacatcaaagggatggaatgagttgttgtattacccttaatgtctgtgtttaaaatggaaaatatttgtcatctggattggtatttaagagatagaacatgccttgttggcccaaggtgaaaacatgtgctttcagttgaaggatggatgtttctgctgctttattcccttctctaggtgtgcctctctaactgaaagcactagtattttatgagtaaagatactctcttgccttgggaatctctagatctgatccagtgtgatgtctcccctcccacaagatagaaaaagctcactccactggagattaagtgcaatctctttggggtataaatctgctgcaccccaactgtaaaaaacaaaggtgaagcaggacatagcatgggggctctgggtagacatcactgagtgctaatgaggccacagattgtggacttcactgtgggcaaagacagcagatcagactagctgtgacttgctcattgtcatcattgctgggacccaggctctcatactgtctcctagaaagcacatctgtttaatatatgcatataccatgtattctcctccccatcagtgcccatccaccattcttcactgcctaccgtaactttagaaatgtttttgttctaaaataatttcaaacttaacggaaatgtcacaaggctggttaagagaaccgcatggtctttctgtttggtcctgttcaccaagcttattttgagtgaatgagtgttaacagattttggctcatcattaatggagacaggtgaatgctgtcactggctccaaggttcacgtacagatagaaatattcagaattgcttctactcaagtggcatgtggggatggcaactgaacctgcctgtagcagaatttatttgctgcctctggacaagaattattttgcattgcttggctgattcactggcttttaacgtctagccacatagcctttatcatttcccctttctctaattaaatttttccgaagcttttgggagtaatttgtatgcaccctgcccctatagtcattaatacctttaatttgctgtgaactgtttaagaaaacacattttcttacataagtacagcaagttattaaattcaagaaacttaatacccatgcaagacttttctccaacctccagctcatgtggtgtgggttataccggagataggctgggtggcacctcttagcttctagaattaaaccagcctagggcctcatatttcacacagttgtcacatctccttagctccctttatattgttagaaaaatttgaagtttgtgtacattggaaatttagagtcaaagactatggcatcgacccccccacccaccccagcgtgtgtgtgtgtgtgtgtgtgtgtgtgtgtgtgcttcacttattataattctatcagctattatgtcaaaagtaaacattttaaaaatgcatttcaactccaaagtaagactgggaggaggaatagcaagcatcaatcagtacatcaaagcaagtcccactatgccttcagtgtacaaatagctgctgatgagtttgccatgcttactgaactgagtaagtataaaagcttttggtgtgcattcctattttcaggcccaatacagtgcgttaacctcagaatatcaaattgaatcaggggttctgagaagagccgcttgcaaagcagttcgaatgacactctccattacactgtctagattcagatcgcagacaccgtaacaggctttcccaacctgtcacccaaagtcacatatgcacagccacccaaatcagccacagcctttccacaagaccctgggctttgtaagccgtggagaccttggggtgggcagccgagcacagcgaaaaggcacctttctccatgaaggggctggagtccccacaaggctgccagtcgcacagtgtgtcagcacagactatgctgggcattgctgcctactgtaccagctgcccattagaccacactgaaatagaattgctgggagcctgaagcatgaagcatgatattagataaagtgatgaaatttcactcgattagagagccaggtcggggacagttactgcaggaaatttcttttttcctcaaatattctcacaactttgatgaatttattgttttcttgcttatttttcattattgtctggggctttctgaacaataaaatgtgccctcagcaggtgctgacatactggagtgatcagaatcataggttatgctgattcaaagactgaaagaggcaaagaaggcgggctagctgccattgctgcaggtcaaaagccctggaaccatgagattgatttgtttagacagttgtttgatttctttttctttcccttttctctagcttcctttgtgccctccccaagaagaaggggtagagaaaagaacacagaagggcaatctttgtattttaggccaattgaaggacagggctgaggcatatgggttagtagaaattgttatttgttcttatttgatttataagggcaggagaaaaatgctccaggcaaagggtttctttcgtcagaagggcttgcaggcagggagtaaatggctgcacacctgtgttctttctaaaatctgggctgggatacccacaaggaggccagaggaaagcggtgtggatagatgctgcttggatttggccaaaaggcctgtgtgtgtgtgtgtgtgtgtgtgtgtgtgtgtgtgtgtgtgtattatcaccttacttgcttaatttagcttatagtacaatttgaaatgtaaaagaaaagatatgcaacgattcagataatgcttggtttacatatagggccttggggcccatcttatcatctctctgcgggtgaggcagaggttttaggccaaccagacacactccggcacaaccctgccacccaggatggctattaggatcagatcacagtttaattgttcctatcatgggtcaagaatctccatggttttagttagacatgctggcctgaaggactgagaacactccagagatatgagttccacctgcgggtggtttgtaggctctggtactcagtaagtaactgagatttgcacttctgttactttctcatgtcagattttacctctggctccattctatgcatataggatgcttcttgaatttttggactcttccttccttccttccttccttccttccttccttcctttctttctttctttctttctttctttcctcataatacaggaatactaacacgttatgtctcttctaagttaccaaactgtagtgaagatgaactgaggttatctgtgtataaaaatgttgagttcctaaaaggaaatttgtcatctgagctttgaatggtgccatgataatatttttataatcaccttataactcaataatggagacaaagacattgtgcaacccaataagggttactaatgtggaataaactgcagagggccttgatattgaggccttatttttctaaagttttttttttttaggtattgcattgctatttatacaaacaaaatttgttatttgtctatttattatgcatgtgtttatatgtgcatgtgtgcatgcagatgcacacatgctataagaggaggtcagagacaactatcaggagtgagtttcatactactatcttgtgttgaattttctataattataacctatgtgttgccaactttcttactcattgggtttagtggcagtgggaggcttacgacactgaggccagtatatacttgccactaaaaccaaagagtgtatctgtccttagtaaggtgatgggtttgtttcttttctatggactcacagatcaccaaataaaaagagagtgccatgaagtgtgtgcccctcccacaagctggatgatttgaattcccatgtgttatagggtgagcacttctgacctaacttgttctatgctctcaagactgaagtgtggccagcgctatctcctgagtgtagattttcctagccccttgcttttgtctcttggttctttgtttgtatcaattaattctggtctaatgcaaaccttcactaagttgcaaaatggggaaagcccatatcacgtgttggctgccaaggccagaaggcagtatgggtttttattttgaagtatgcaggaggagacatttaatacatttccttctctttaccagagaactggacacagccaggggaaaactgtgttctgtttgtgcccattggcttataatgaagagtatgtttcatcttgagcaaaatatcacttgaagatcgagatactcatccaaatgtgttgtgactttctccagtggtatagccactggtaaagtagccatgctgctgtaaatatctccttatgcacacttctgtaagtgactgtaggaacagttttctgtctagacgactgaccagctctgtcccatcaggtgctatccaaagaaccacacagcacagagacttattaattataaatgctcagccaatagcttaggcttgctttttttttttttttagtgagctcttataaaataaattagcccatttccattaatctgtgccctgcccatgttgcttcttccatatctgacttgagactcctctaactccaccctccttcttcccagaattctctctgcttcccaaatcctgcctaggtattggctaatcagctttttattaacaacgagagcaaaacctctttacagtgtacagaggattattccacagcaagtgacactaatgaaactcattgtgtcaaaagaaaaagacaaaaggaaaaaaaaaacagggagactagttggcaagaggaaggggattactgggagaaggactcagaggtagcagaggtgaatatgatcaaaatgcattacatacatgcatgaaaatgtcataattgtcccaatgaaacccattatatataattaatacatgctaataaaacatttgaaaagaaataactttttcttatgaaaaatcccaataaatattctattagaaaaagcattgttttcccctgtggattatgaggccccaagggttacactagactgttcttcagtttgaagcagagacttgctctagggagtaggtgttttctgttttccagcctttctcacaaggctctgattagcccagcgatcattttggtgcaataatggaacagaaattttcctacaagcaacaaccacagagcttcagttcagaatataccttggggagattgggtggtcccatctgccgggaaacagtgtttcttgagagaagagcgatgatcctctgaggctggaccaccgctgtacatcactgtcagatgcaatggatggggagggagctttacctttgtatttgctcccctcttcctttaattagtttgcttttatttcacattaatgtaagaagctgaaaggataaaatgctggacactcttctattctgaggggtttattgcttcagtcctgaacaatgatatctgtcacctcagccagtatgaaggaaaagatacaatttctttccccaacacttttagtgacatgacatatagatgatggactatgtgatgatggcttagctaggtctcatttttttttctttttttttctggggcaatcacaagcacttaaggcctcagtgagtacttattattattactttttaaatcactatgagcatgactaggatacttaatgtttttacatttcatatgtgtgtgtgtggtgtatgtgtgtgtatgtatgtgtgtgcatgtatgtttgtgtgtgcatgcatgcatgtgtatgtgtatgcatgtacgtgtgtatgcgtgcgtgcgtgcgtgcgtgcgtgtgtgtgtgtgtgtgtgtgtgtgtgtgtgtgtgtgtgtgtgtgtgtgtgtgtgtgaagatcagagggcaacttgtaggaggcagctctcttcttccacctgtgattccagaactggatgtcagggttacaaaaactctcagcaggtgcctttgcctcctaaatatctatcctacagatctaagagaaaccagggtattctaaatctacttttaaaactggattcattttccatattactgagccaccctaatcctgtaaccacaaatgatggtgctgcaataacaagaaaattctgtattttaattgtcatatttcactgtttaattatggtattttttgtatgacctctcttatctggacactgtgcaggggagaaattgcatgtccttcagttttaagtcttgtctatcagtcttgtcactttgactgattactttctttcccagaccctacacgacttatgttttctgttggagtcagctgaattcattccccctggattcctcatgctgcaggtggtgtgctatagcagagcttgctcacagccagaactggggttcagagaagcatctggaaacaccctgaatgttcaggtattccttctagggagggttctttcaggacagagatgggccatagtctgctgttccttcttctcacccagcttttccaggtaagatttcaaatagagatggaagaatggacagaaggggagatgatggaagtctcatggagcttgatttttaaataatccgcagccatgtgaagtgttaagaactgagtttctgagctgagcatgtatgtagttcaatagtagaacactgggttaatgaaagcatgtataaggccctgggttccaacttcagcactgggaaacctctctctctctctctctctctctctctctctctctctctctgctctctcatacacacacacacacacacacacacacacacacacacacacacacacacaagacacatttgaattggccttgggagaaatgcactaaactcaagatcgatcaggagtatatattttaggaaatctttaaacacacttgatgtggtcaatgagtcctcagtgtccctgactaaagagattagttttgctcactgtcagttgttatctgaatctaactgagattgaattccagcccatacgtaataaggaagagaagaaagagcctgtggtcattgggaatgaggagacagctgtgagtggaaatgaggacacagttgtcattgagatcgagggacagggatcctgatcagtgggtatgaggaaatagtagttattgggcacgagggggctaggctcctggtcagtgtgaatgagaggacagggattctggtcaggggaaacagatgttgcattttaaacatggaattggcctgggaagttatcattgagaaaaatagcattaatgtatgaagtgagaataccaagttcactttacagaatatccaggttgaatatcaagccaaagattatatcagaggagtcaaggggagagtgagaagaaacgtggggtgcaagggttgtcttcatgatacttgatgattcagagaaagaggactcttaactcagagattggagaggggtgagtggggttgtggaatctaagacattcaaggacagctgactttggagaatagtgtgtgggccatttccaagagaagatggatggaagagctcatggctctgctcccaggaagaagggaagttcagtgactgcagaactctgttctgtgtgcatccatgtacatgtgtaagcaatgagctgggagcaaaacaggtaggctatggcagaggcccaagaagaacaaaactcatgagacaatcctgcagtgttggggttctcagggtgtgggcgagaccagaagcacccacattacatgcagttgcatgtctctaccagagccagacatgaatgactttgggagttggggcacagtaatctgagttttcccaagtctgtaggtgattctggggtagttaaaagtaaggctgagtttctgtccaggataaagggagagtgactggagggtaaaactagaggatagtcctgatgttgtactagttatgaatgtaaaatgagaccagtcaacagagtgatatggctttctccaacagtgattgtcatggtacaccgagtcacctgagttgatggacatggcctgagcatttccaaagtgaaaacaatgaagcaagattgtcaggaaggtatatgagagtgtcatatgatgaactgtctaagtacagaagaaactaggaaactctgaatagatgacacaatgagtggctaaaagctctgagtggggccaatgcttcttagagttaaggcattggagtgagctaggaagacaggtttattgaaacagtaattttgaaaggctcacatttgctggtaatgatcaatgtagaatgtgaggcttggggtaaggccgtgaggcagagtggaggcagcattgagcgagaggcatcagaacacaggctgggtatagtagcccatacctctgaccccagtttctcaggaggctgaggcaggaggaaaagtttaatgctagccttgcctggcctcagatattgggaacatggtatatagaacagcgaagttacaaaatatattggagaagtagctgtaagtcaagacacagaaccttcaggggattgggacagaggagcagtgactggcaaagaataataataggctactcaaagaggaggaccttactcttatggggattgaaataagttttatgaaataaggacacctgctccttcctgcaggcctggcattggcagaatcttgcaagctgctatagctaccactctaggctgctgggtgaaaagtaagtggtcccacaacaatagtctgtctatgtagagtgaggaccaaagaggaagctttgagggagtgcaaatgattgagcacaggttcctcaaggccatgtgggagagccatcacctgggctgtgtggtgcatgaaagagaaatagagaatacagagactgttgaggacaagagtacagaagcatgagagttgatagacagtctgggcttttcatgcaggctgacactcatcagagaacggggcaaaggaggtgtacctggatgttctcaaggaagacactgagcttctagaaggctgggagtgctggagggcaatgagcacacagctgcccagcagagtaccatgctcagccttactcttgctcacagggaagtaaatcaaggacagaaaacttgccctggttgtctggcaatgtgagtacagtgtagggaccaggaaatgttaaccccctcctgttggacttgtggatggctctccggagtgcatcaggaagtatctatgggcaagcagtactgggagagcatatgggtcaaggctactctaatttcgaggttcgtagttggtgcagttcaaaagttaacaaatggtaatgaaatttcactgttgcattggtgtgtgtgtgtgtgtgtgtgtgtgtgtgtgtgtgtgtgtgtgtgcatatgcatgctggtatacatagctatagaggcaagaggtccatgtggggtgtcttcctcaaccagttcccaccttactgtttttcttctcttcccatgtatgtgtgcatgtaatgttcatgtgtatttgttggcatgttcacatttcttaacttatttttctacgttattcaccagggaagggcctttcgatcaagcctggggctttctgatgtggctagtgtttctagcctggttactctgtctctacttcctaaggtggtattgtaagttcactgctcactcttactggcatttccatggttcctgggggatccagactccagttctcttgcttgtgtggcaagtgctttaaacactgaaccatctatctagccctaccttattttttgagacagttctctcacttaatgtgtagttcatagattggctatactggctgttctgtgagccccagggatcctcccatcttcagttccccaagatcaggctcatcaacatccagcatggatgcagggaggtatctctgagctctttagagttaatggtttctagaagaggaagggttctttgagggtatgaccccttgtgggctaaccatgctagagtgcatgactccatgctcatgactacatgggcagcacacatcagatgtggggagttataaaaaatgaaacaacatgaaattcagagatggggaaagggaggaaggggtgaatttaggaggaatcaggagaaggaggaaatgactgtgatcaaaatacattgtccatataggaaattgtcagagaattagcaaaaatgctatgtgaaagaagaaaaaaaaacccaaagcaagagaaatgaagtctgcccttcacatatgaaagcagctggattagagagcattttcatgttggttcacggtttcacctcaagtgcatttgctgcaattgtatatcacaggggaagccacttctttccatgttggcaccctttttaccctcccaacatgctccattggaggaatcactggcttgcagagatgctcgctctgtgaaaccagcatggttagcgacttgagcgcaggtcctggatgcaactactgtgcccagggcacagtaatgcttacttctctgagactgtagtccttgcatgccgagatagggctgtccaagaagcagttgtctccaatgccaaatgtgttcacagtggctcactccagtgcacacctcttcagctttggcaagaattccaaggacagcaggctgtgcacttgaattcacactgtgagccattgcagtgtgtggaaatgcttgaatgcaggtgcaattcttgtaatgtgtctttagtggcataactctacacagaatgacaagctttaatgcatcatgtccctcactgctaggcttaatgtgtgacaaaggaggggactaatgcaaacccaaatgaatccagttcaactcaataaaaatgtaaagattagttatttttaaggaaatgggtatgtcaggcaagtgggcagctgcagacatctttgagcatctgtggagagatggagggacaagagaaagtgatttgcttctttaaggcctgtggtaagattccatacacagaaaatgtaggaaaagatgaactggtagagggtgtaacaagaccattggttgctaaagagcttggggaaatggagagctgcccaggttgtgaacagagaattttagggcaatgcaaatattctaggaaaccacagtgctggccatgcacattgtacatgcagcatccactgtcatagaaggctggggaccacaatgactcatagcatgaactagaggctttgagtgactttggtagctcctcagtcatcacaaatgcatgtctctgtgaggaatgttactaatggaagaggctgtgaatgtgtgggaagaagggcacatgggaaatctccttgtcttcatctcaattttcccatgagtctaaaattcctcttaaaagaaaatcagtaaaactgagcacactaaaaccaagaaaaaaagtctttgaacctttgcagagacaaattgtcccagtgaaatatgaaaacctctttcttacccatcttctactctgctttccatagtttcatttctagacactttctatgtttagaagatatcctcaaaaaagccagagttaaactatagacagtattctgtgacttaagccttgatttgctatacagaagacatgaagatttattaccacccaggcctggggctgtgcctgagggagaggaagctcaacttggcaaacctattaccaacagattgatccctggctatcatctcaagagttagagggaagaatccagaaggttccttccattctttctcctcagctgtctcatgttagctgtgtacattagcatcattaacataatgcatccccagtaactaacttttagatggatctcattttcaggcagttacagccaagctggtgattatctctgtgcaggtgcattttttttttttttatgcactaagacaaatcgatgaactaacttcttttttagataaatgaaaatatcatggtgaatctcactgtttggtaaaaataacattcattaaaaagaaagatgaagaggtactagggatatgtgcacagatagatgatgtaaagatacagtgggaaggcagccatcttcaagctgaagaaagggaggtagtgatgagttccgaggaagccaacccatggcccccttttccttggatttaccactcctacaactgtaagaataaaagtttctagttcttcaaccatgaaacttttgaggttttcctttgaaagcttgagctgactaaggcaacctgtggctgaaacctagtgaggatgttgtgacaaggaagacagagaattgcatgccagacagggccagaatgactagtgtttgaggacttgagtcaagaagccggatttggcattaagtgtgatggaatggaaaggctgggtgcatttaaatctcattccattttctataagaaaaagcaaaacaaaatgataggaaccagggagaaatgaaggaaacctctaggatagagtgtggagactgttagggttagggtatgatttggcatgataggagccttggatctctttccagtgttgggccctggtaggagtagttagagaagcttgtcctggtccaggcagtgagaagcacatagaggagagtttacagacacttggagtagagacccaaagtcctctactttagttcgaatcacggcctgatgatttaagcaatggtggtgacagaatatcctgtccttccttcccaaaaggagagtggacaaaggtgtgcttgtgttttcgacactggtgagatagatagctgtgggcacagaggtgaccagagtacccatattctctttagctttctcttctctctcatgagtttgggctgatggtcaagcttgtggccagccaaggacaaggtgtcccaggagaggaggggccagtgacataccagggtatttgattcttcttctggcccacagcccaggcacccactctgactctgaggatctgatctttctctggcactagcaagctgtatggttcagctgttactcaatcaggacatagaggaatcatacaagaacattaagttatttgcaagggcgagttgaattttcatctaaattcatatttcaaatccatgtgagtactttagccaaaatagcctacccaggatgatggagaagacttaaataaagcaccattgactcctcagatgcaaagtccactcttacctcttagaagaaattacagcttaaaataaaatcaaaaggaagttctgttttcttgtaagagaaacttaattctgaaacaccttcccctgccattccttacactgcttcttcatcttgttacctctgtccaggggtgaacttattccatccaagagttctaatatttccaggttcctaaggaattaaaaagtcaccctgcctcaaaagatgagtgatcacagaatcagatccatatgaaaatatatatgtgatctctatggcaaaggaatattagagataaaagcaatgctgccacccccccaatgagccagtaacggatcaaagcagagatctggtgttacatgaaggaaacaacagagaaaaaagtatgaaggcaaaaaaaaatcattatgactgtggatttgcccatgtgccaggcactctctgccagctttctcaagtatacagtatgttcacttcaactcaatcggagaaatttttcatcctgaagctcgacatgcagccatatgcttcttctagggtcttgcacaggctagagcttcctctctgagctgttgttaaaatctctgcttccaaactccaacgagaaatgcatacatttccctaacattgtccaaaatcctttccagtggaaaattctatggaccacagaaatgaccagcttcaagataaccccaatatatatcttggggtaaccaacagcaatctaattggacttaagattcgtcctatagaagggaattcatgcctattatgttaaacttagtcaactacttggagaggtcatgggtcacagaggaaaacctactactcctaattccctaatgtgttcttaatacttatccttataggcacagaggcaaatagctctcactgttcatcaaagaggcttctttttcagcaaagaccagaaagccacaactggttaaaatgcagagaagaactgatcatggtgtacccaggcccagaagatatatttacaatgcagcccctacactaaagctcagggaacattgaggaaaagggagcagaaagactgtaagaatctgagtagcaggacatctggaagattatgtcctctgtatatgaaaaggaagctgaacctgtgaaatctcaaccatatggcagcctaaacaaaccttagcaatgacaataccagctgacatgccaatgtgtataggagaaataccacaaggcctcacctcaaaatgaggagcttttagtggctatttagagaaggagaatcggtcttctctagggacaagaagccctgataggttatccaacctcaagaggtcatccctaaatacatgtacatatgaacgacattaaatggactctgaaaatagtatttatggatgtggtgtgtcccatatatatgtaacaataattaaagaagaaagcatgaatttgagagggaatgaaagacaggaggatgtggagcggggaaaagaagggatggaaatgatataaatacggtgctcatgtatgaaattctaaaaatgaaaaactttaaatcttctaaaattaaaaacaaaaacagaaaaacaaaagcatgcggcatattaggcatagacaaaatcctaaattcccatgcattttaaaggtaggaagtctggattttatacaaatagatgtcttgggattttacagcagggagttctatgacatgacataacttgtggaaaggtcaaactggtcatgataccacacaagagtaggaggcactgcagtggagacaggaaggctggctgagaggctgaaaggattcatggaacaaatgtcttcccaggggcaaagctggagaagagatagagtcagcatctatgtagatggtttcctatggagaaatgtatgacccatggtagggagtgacagtacagggctttcactgatgactgacctgtgctgatcatgtgaagtgtatactatggagttgggtggaaagtgagctgtgtattggacaggattctctagagtcgtagaacttacaaaatgaatctctatatgtgcataaatgtacatatgcatacacatgtataaatgtaggtatgtgaatgtattagaatggcttacaggctgcagttcaacaatggctagctgtgactaaaatgcccaagaatcctagcttagtcccatgaagccttgtgtctcagctggtcttctgtatgtgctggaatcctgaagaagtagactccagtgccagtgaagaaatggatgtgctgagaagctgagggcaaatagacaaagaatgtgcacacctgcttccgtcttccattttccttccaacagaagttgtggcccagattaaaggtgtgccttctagcctcaagacctggaccaaaggcatgttgtcttcttgcctcaagatttggatcacaaatgcgccctcaatttctgcattatacttcattccagatatagtcaagttgacaaccaagaataaccaccccagactgtaacagccacatacagagaggcagtgctgggaagaaatctgagctgaaaacacatgttgagaccttctaaacgcatatctagtggtgaatttgacaactgaaagagattatttaggaagagtgcaagattgggtgcacaaagagactagtggaaaaagaggagagaggacaggactagggccctgggaacaagtcccaggccctgacatttggaggatcaatcagggtagggaaaattcctatgaatgatgtagtctttttcaggagctcctcagtggtgtttttccaggaacactcaccgcctctgatgttcgcccattctatcacagtgactaagcaacatctccactttcccaggattttattttggacacaggatgatgcacaaggcaagattttgccctacaactacccagagcaggtttcttattctcagcactattgactctttgagttgtcccaccctttacctggtaggatgtctagctgtaccctgacctatctattggctataagtagcacctccattctaatcgtaacaacttccaacatccggaagaatagcacataactgagaatcactcctctcagttcttacggaagaaatagatggacaagcagattattacatcatgattcatgtgggtcaaggtacttagtggcaaatgagagattcttcacattcttagtgtgaagccagaatggactgatacatgttttcaggaaggggtagtaggtagcttcagaactctggcagattaacagtcagaaacacacccaagcagtcctcatgatcgctctgcaaatgccagagcatcagagtccctactcctaccaccacccaacatggaatgagctccagcctaggtgtcagaagcaacccaatataatctgccaagcacctgtaccacaggtaccacatgaccttcacttctacagtttcaaattttccatgggtgtatctggtgtgtagacctgaggttttgcagttggttttgattttagtgtagtgtgtcgggggggtgggggggtgggggcagtggttttgaaggtagagcgacacaatttttcaggctttaaaaatacctcaccattgtccaatttataatctttggaattaactttcaatttcaaactcataaatttccttcatgctagccaactgctattgctggcttttacatctcttcacccaaatattcccagccttcctacaaattgactttgccggttcagctccattctgctgggcgtttgattagctcacattcacactatcctacagccccatccttttttcctcacttgtgttagcttttgggttttctctcaatatgcggagtccagacatttgtctcatccaaactccttctctttctggcttcctgagtatagaaagaaggaactgaaatatattaaaatcctatgctgtgtcagatacagtggcaagggctttgcatatctaatcttgttcctaagcactgggtactgtgaggagaggaactaaaaaaatcagatgactcaaaaagtaaaagaaagcagagaaaaaagagatcaaatagcaaatgacaaaatgaaagcctttgggcatcaaatgacactagcacaaagatgaaaaagaatccagagattgggagaaaacatctataaatcacaaatctgatgggggctaatatgacagttacaagactttaaatacacagtgcaaaggcaaaacccaattgcaaaacgctgaaagatgtagattcatgtttctctaaagttgtacaagtgagctaatgaaagattctgatcgccatcagtcctgatcaaagccacagtgaggtagcgtttcacactcactaggatttcctgtgataggagctgaaaagtaaacaggaaactgtgagcggtggtgagatttagagcaattggtgctctcacacactgtacctacagatgtgaaattactgcggtcattgtggaaagcagttttgagaaatgatattcctcataaacactagtgggattgttgcgatgtgttaatttttgacatctgaatgaagtttttatgacaattcaaaaagaggaaagattgctttagctcacagctttggaggttttgtccaggtttggtttgacccattgctttgcagcctgtggcaaggcaacatgggaagataggagaaggaaagagactgggtccctcagccctatttgaggacatgtccctaatgatccaaggcctctcacaaggccctactcttcaacatcccacagtttctcctatagcatcacagattaggcctcaaatctataattctggaacctttgaggcgtccttcagatccaaaatacagcactacataaccctaaaatgtcactctagactacatacaaaagaaacataaaaatgtcagtctatttaaaacttgaacatgcaaaatcatcactttggttataatcaccaaaagatgaaactaattcaggtgtctgtcaacagatgattagataactaagttgtgggatgactgtacaatggaatattaagttagacacttaaagggatgaggtactggatcagctacaacaaggataagtggaggagatatgtttaatgtaaggaaaaaaggtaggattcaccataagacatgttcaactcgaggaagttcacagaaacagagactagactggagagaagagcagattgagcagttatagttttggaggggtgtgaatgtttgaaatcaggtaacagttaaggattgcacagtctttgggatgtacggggaagcactgagctgtgtggttaaagcaacgaatgaactaaatcgtactgtctttcttaatctttagtgagaatataaaacccttagccacttgaccaccagaatcagttcccaactaaatccaggtaactataatcctaaccccagagcctctcttactagatgtgtgatggtgaacaaggtatttgacctctttgagcctgtttaaattctctgtgggatgatagatttgtcttgagaattaagctaaagacataccaagagcacctatgaatgtctcgtcctacaagcattgaattcattgcagttactagattctcaacagcaacatgaggggtttatgtatgcttgctctatggatgaagaaactgagcatcagtttagataaaggcctctgattactcagctgggattcacaccacagcagtctgatcccatttctacactgcttagcccatggtattctcctgtgtaccctgcttgtttccctaacaactcatctactgagcccttcagccaccggagagcatataggatgtcttccaacatatacaactcctcagtgtcacctcaggatccccctgttgctacctccaaacctgcactttggtgggtacagacacaagcttttcttcctaacgcagatataaaaaatgtttttattttgcttagaatgagctttatttgtttattttgtttttatttggatttttatgccttcagaggctatacctactctttctattttgtattataagccacttatacataaatgcttctttaagccgtcatgtgactcacataatccatcaaacgggactgattaaaaaatgccttgtgccccatttatacaaaggattattgtgcaactggaagaaagataaggcaaatctgtgtgtctaatctatagtgacaagttaataatatgcatgttgtggtccattcacactaagtttattattcatgcataggagcaattgaaagagtcttgaggatgttagctttcggctcagtatataacaaatggggttcaggaggcattaggtggggagcaggacttcaaattccatttaacatttttttttctgttttataagaaagagaactaaacataatggaaagatttcttcacacatgaggtgttgctcatggggatgatagcctagaccaatgggctttaagtattttcgcttcctttgtgaggatctcatgacatttcaaatacctgtgtttcatgattcctaaagatgtatagagaactcactttgtagcaggtaatgtaataagcacataaacgaatgttgtattctcgttgttaatgactttatacagtcagttcagttcttcctccccgaaagggaagttctccaagacttttaaggagtattgggattaaagtaaaataaaacccagaaacactgtacttttgaagcttttccacaggaccacgaagtacatgctagctgagccctgaaaaggttgcaatgggaaatgagctatacggctaatgcaatagttttcaaatgagttgagtactttggaataccaatttcctggaagctacttagggaaacattggcctagtgctatgggctatcctactgtcagcttctgtagagaagaaggaataatgttgccgttgggattgcttgcttgcttgtataattggtgtctatacttgagagcattaaattttaggaaaggtaattaaataattcattgtttgatgatatggaagaggctaacttgggagtacatttgcatgggcaaatgcatgctgatgtgttttcccataggcagaaggggcgttttaatgtttcttgtgtgtctgatataactgttgattatttccttcaaaactcagtttccaagttttgttcagagaagtccttaggtttttgtaaaggtgaagctgtccatggatacagcatggggttcttttggaaacatggatgaggactattggctgagatgacaggagactttaaagggccctgatgtggaaggccatcagcagttctagggcagtgaatgtggtctgtcagagaataattttgtctggtgcatttgtttagataaaaagtcttacagagatacaaaatttaaattcattttatttttatattttgaattttttttgctagcatttgcaataggaatcttagtcattgggcagccaacattgtttacaggagccatgttgcaattgctggcatccagaattattccaagagctggacttacagttgtcctattttctacctacctactgattggttaggaaaactaaggcattatagaaatcatattataattttaactgtttaacaacaaagctttattgtgcaaagaacaagagaagacaaaaaacatccaagaaagctgttttaagttaatttaactttcaggccaacattttatggtacattttaatcgaatttggactactttctccttgacattattaccctttaaaaaaatacattgtagcaactgttagtgtgatttcaagggttaattgttctccttagaagactgatccacagaacatttctgagttggggtatttctttattaatataattcctagtttaccagaacagctaaaactgtgttaacagggcagatcaatatgttacatgagaattaatttacacctgtaaattagtgcacttatgttgctacacccctcattaatcaattagacttgaaaatactcaaatgatacagcctgcgatgctcagtctcagggctactctctggagaaaaagcattggaaatgaaagctcagccacccgtccttagaaagtgccctcgccctcagatgctctgtaggatccgacaaagagtaccattaatcagcttaaaaactcatcagttgatttctcaagccagcctctgagataatgggtttcattatgacactttagtgaatatacaccacgtatctttttcacgttttcctccaacgtttcctgtccactaaaaggccacactcactgacgttttctcagcagtcaggaccctcaaagaagagagtgtggacacgaagacaagattgagacaaaggagatgactggagaagtcatagtgcagttggatccccgagtgcagtgtcagcaggcctgggagaggtctggaggagccggtccatgagggctggctcagcatcaaagcagctttcagaacaatgacaggggagagtcaggctgtgactcattacactgggcattatttcctgccaggctgcctaaatactgataaaaaagacagcttttgtgagcagaaattaaatgagttgtggctgtggaggcctaagccattctgccaggaatctatttctttttggtggttctggttggagcagatcagactctttcagtatctgctctgagactagaaattgagagagaagcaaagagatcacacgggctttagggtgtcaggatgcggaaatgaggtgctccaagagtttggagtcagaaccttgcctggtgcacaaaggggtgagttaatgatgagatttagaggcagaagcggcaggttgcaggcttcagcttcaggcagagtgaagcaagtacgctccagggcttttcatctggaagtcagctggattttgcattaaatatactttgggattcactgctgggcttccaggaaatcatagaaatctctaagcacctataaataaaccaaagccaaactcggtgctgagaccagagcagagaaggacattcaaatagaaggtgaatttctaaaaggaaagtactactaacagcgataaggtgaattaagcctcgcgttaatggtagggacaggaatctcacctgtagttgccttgataagaccgacaactctgaaaagagaaagcagtccaagatggaggttcccccagcagaaacaaaggcaaagccacacatctatgctaaacaaacacggggaactcctaaacaaaatataccaaaataagctgccaaggtgagaatttataacaaaagcaaaaacaaacaaacaaaaaaaccctccaaatacacttgaagttaaatatttcaatataggatattataatatctcttgtgagtgacataattttttaaaataaaaaattaaataagcattaacagacaaaagcagtccagaaaataagaagaagaactatcctccaaattaaacacacaaaataaaagatctaaaacaagcatttgcatatgagaaagaacttagggtgtttgtctttctgggcctgagtgatcttgtttaatacatacatttcaagttttatctacctacctgcaaattatttctttagagccaagtaatattccactgtgaatttataccacattttttcttacccattcatctatcaatagatatataggttgactcaaaacaaatcccattgtataagtgtccctgtggtagaatgtaaagtccactaggcatgtgtccaggagtggtatagctgtgttatatagcatttctatttctagtcttgtgagaattctacattctttaaatgtcttgtagaattctgctgagtattgattgtttttaattagtagatgttttattactgctttaatttccttgcttgctttaaatcagtttaaatgattgatattatcttggtttaactttgatgggtcatatgcatctgaaatgtatctgtttctatgttttccaactaagtgaaatacaggtttaaaaaataagcccttgtgattctctggattttctggatttctcaattatctgttgtgatgtctccttgttcatctctaattttattagtttggatattttctctcattcttttagttaatttggctaagggttggtaaaaatggtaaaaaatctttgaaaagattttcaaagaactgatcctttgttttcattgattctttttactgtttgtttactttcatttcatcaatttcttccttagttttattattcattcccatcgactgcttttgggtttgatttgttctttcctccccaaaactcccgagaaacattactaatgacgtatttgatctctttctgaatttttaaaagtgtagcccttaagtcctttctaaggtcaaggataccatggggaagttcacacaatcaactcacctgagctgatagggctcgcagacactgaactgacaaccagggagtctgcatgggactgacctaggcactctgcatatatgttacagttgtgtagcttggtcctcttatgggactcctaacagggaacagggactgtctgactgttttcctcgcttttggaaccctgctcctcatactgggtcaccttaaccagccttaacatatcaggaggatagtcaagttgcttagtcttattgcattgatatgtcatgttttattgatactcacaagagatgcgatggaattggaagaggattggggataggatgtggggggtgggagagagggactgggaggggagggtgaggggagaggctgaggccagaatggaaaataaatagatgaataaaaaaagttcccttctaagagggaaaccaaaccacagaggtttttggtatgatatgttttctttaattccaagaattgttttatttctccattgattttgtcaatacttactcatcattcagaggtgtgcttttgaatctccatgaaactgtacatttaatatagagtcttgctattgatttcaatctactttcattgtggctagaatatgtggagttattttaattcttccaagttcgctgataattgctttgtgtcctgtgatgggttgaatgagaatgttcccacaggctcacatatttgaatatttagtccctagttggtggaactgttttgggaaggattaggaggtgtggctttgttggaggaggtgtgtcacagggggtgggctttggggtttcaaaagcccatgctaggcccagtctatcttgctttcttcctccaacttgtggatcagatataagctctcagccactgcttcagcatcatgtttgcttgtcaccatgctcatggccatggtggtcatgaattcatcctctgaaactgtaagcaagcccccagttaaatgctgtattgtataagttgccttgttcacagcaatagaagagcaaccaagacttcacggcatgtgtcctaatttagggacaattccaagttcttctaagaagaatgtgtattctgtagtgtttaggcagaatagtctataaatacctgttaggtccatttggtccatattcttattcatctatgatgtttctgtttggtgtttgtccgaatgacctgcccattagtgaaagtgggctattgaagtcacctactattgctttctaatgcctacccctagcatttgctttctaaaactgggtgcactatagtttgctgtatgtttagaattataatgtcctttgtttgtttttcagtacatggtttcttcgtttagccctgactgtcctggaactcactctgtaaaccaagctggcctcaaactcacagagatctgtgagaactgcctctgcctcctgagtgctgggattaaaggagtgtaccaccaactgcctggctgtaacatctttttgatggccattctcatgaatacagtgaattctcttttctaattagtttattttgaaggttattttatcagatattagagctgcgacacctgattgtttcttgatcctgcttgtttacaacatttttgcccatcctttcactttcaggtagtgtttatctttgaagatgagatacgtttcttatagacaacaagaaggtgaatcttagtttctattccaatggggttgtatgttttgttttttgggaaactgggatcattaataatcagttattattaatagttattataaagtacccttgatttatttgtccagctttatatagccattctcttaacgttttaaactactccctcacagcttctttgctgtgctcatccttttcttccatctagagtattcattacagcattctctgtagggctggcttagtggtcattactcctttagccagattttattttttattttcattttgttggagtaaacagcaatttcttctctttttaacaacatttttgatcatgttttccccttccccaattcttccaagatcctttctatttccctacctacccaactttatgttctcttcctttctttaaaaaaaaaaaaaaagcaaaaaacaactaaggaataaacaaaaaccaaccaaacaaaacccaccaaatctctctctctctctctcgagagagagagagagagagagagagatctcattcatacacactacacaataccacaaaaaagggaatcaaaacaaacatgcaaatgactgatatgatgcctattatacaaaattttttctctttggttgtgatgtatcgtttttctgggtaaactagtctgaattggcatctgtgtagaacttaaggcataatgatccaggatcttttggttttcatttttttcattgagaaatttactattatttgcatgggcttgtgtttgtatgtgacttaggccttctctcttaagctttcaatatgttttctttgttctgtacatcagtgttttagctataataaggtatgggaagtttcttctgttctctctatttggtgttctgtgtgcttttgttcataaatggatacctttttctctggatttgtgaaagtttcttctgttatttcattgaaaggtatggactatttctttgaaatgaaattatttttcctacttctatgggagtagctcatagatttatttattttttgtggtgtcccagaggtgctacacacattcataagatttataaaactatgatttactttaattgaatgagtcaattctcctacttactcttcaaactctgatagtctatcctataaagaatccattctgatcattgcagccccagctaagtttgtccctcagtcaccaccataaccacaggtggtgacccagaacctgggtacccatgtggtccttggtggctacatgagccatgaacaccatcacagaccctggctgctgtaggaccatggactcagacatggcccttggaagcagcccaggcatggatgccatcatggctctgatgatggtcacaggctgcagggtggcccttggactccaacacaaccctagatgggggaccagacccttttctgggtggccttcactgtcaccagtgatcatggtgtcaactgggccagagttgctactggaggacaactgagtctgtggccttactgtagccagggtctgtgtcagtgtcagtggtccctattaccaccaaaggccatgctgatgtccagggtataggttgacaccgaggccatgtggtgtctgaaagtcctgtgactgctgtgaccttgcagatctgagtaccctgcatagcaacctggggctatggtaattcccagggttgagttgtagcctggggccatgtctgggtctgtggtccttatggtctgtgttgatatccatgcctctgatactatagcaggctgggcagatgcatgagatttgggctgccacctgggaccatgctgttgtccgaggaccaacttgcagctgagcaatgccaatcttagtggcatgtgcggtcacctggggtcatggtgacatccagtccagggttgctgcagaggaccatgactgggaaggtaaggcctacaaggttgagagatgagccaacctggaatctgcctggtactgccaggcactgattgtgcctagccaatgaagggcaaccacacaatgtcaatggatcagaacacatgggttctgggaaggtatgtaagtctctccccattgatgaataaatgactctgctctttgccttttaactgactcctgactcccggtgtctgtctgtgtagttgacactgtgccttttgacccccatacccctgtgaggttcttccgcaacccggccctgtgatgaagtccatgcccaagttgtcatcaaaggccacgagaacctctggcctctgggctgccacctgtggcatgctggagtctagatggcatgttgctgcttgtactatgccaagccaaccttagtgagctgcaggctgctggtggacatggtgtcatccaggcccaaaatgttgctgaaagccacttctgggtctatggccccaccgaaatcagggtctgcactgatgtctgaggctttggctaccactgaaggcaacgaagaggcctggagtccagactggcactgtaaacctggctctgtcccaataggagagctgcccctccacatacttggcaaagcttggcccacccctcactatgggcctggcagagctggcattgcccttcactggagagtaggaggacttttcctagcagctgggaccaacctactcagctgccacaccccaacatctaccctatctatgatctatctgctggagtgtttgaaggaactgatcctgctgagccatagcttcagaatctccactgagggcaacagcaggatattggagagctggagatccagttttggtggtgtaacaaagccagagaggccttgaacctgaccaacaactcattacacaatgatcatctacaactattgctgtttggacaaaagggtctacagaacaatacacagcagatcctgatgacactaagatgaatgaagaggcgacggagatgtgggaaagatggaggagcaaagttgtttttccttttttattgtttccttttatctcatttttatttttttaagctcttattagggttgggggcactacaagagtgcgggatgggtacggagagactgggagatgaacaggattggggtttatatgtggaatcccaaagaattaataattaaaaagaatccgttctgttgctgaggatttccactgagagattttattatactttctacatttttcatttccagtttcatttcagtttgtgttttcttcagtatttttctctgctgaactcaactttcatttactgaatttttttcattccttcactcaggtgtttgttttcttggatttcaatctgtttacttctgtccctctcaagttttcaggtgtttgttagtcttctctttgaatttcctgaactctttgaacatatttataatagctgattttattctgtatcttgagttttgtacaagttgttcttgctgaaaacaattactgtggctttagtgacctttgagggagtcagattttaggttttcatgttactgggacctcagcactggggatctgcattgctggttgtgccttttgatatgttttagttgttataagtttctgatgtaagtttttagcctgctgggcctcaggtggtccagggactggtgtggttcagaggagtcctgcagcaaactttccctttgttcaaagggaagtgggactttcaccagggcctcctgggcaggtagaaagagcctcaggtcaggtgaagccaggagttttgaggaagtgcctagggagcagagctgagggggcagcttattgctgcacagaaaggaaacagagaagggatacagggagggccaaggcaagacacaactcccaaaggcatacccttgtggcctatatcttcctgataggactcacttcctaaactctctacttcctctccagataacaccaccgggaagggaccattgcaggagctgctgggtagcacatcatattcaaactgtaacaaagcaaatctgacatgttcatcaaatgagaatcgggtgaagacacacatgggacttttaatgtttcttataatttggctatatgttttcagttatttccaaatgccaaatgcttttaatttccacagaactgaagaagatggaagacttcaaaacatccaaagggggttgggggtgtgtgggtgaagactgaatgaatctgaagtctggaaattggcttaaggccttcagatgtctattgttgttgatgtgagttttttttttttttttttttttttttttttttttgtgtgtgtgtgtgtgtaatgtagtcaattctaaaggcaaatgctaattcaccagcaaaatggttgtgaaactctctgattacttctccagatttgcctatccagtaactgtgcttgatgcatccttcactgtgctggattctgtcacttggattgcattccagaaaaccagcacccagttgcagagtcacagctttcactgccattattagtctgtagagaactgccacagaagactttttcctggagactgtgacttccttttagtaactatgatttgtattgccttggtgaaggccttttgtatctgccttgagtagagtttagaagttaggtaagcagtcttagataataaacgtactcaagcatcccgtttagtggtccttgatgccttctggatatgccatgggcttttggtctttcaccttcattttgtctgggtcaacaggttttgttgaagtgaaaaaaacctcttagatccactcaaactgatacatcaaagtcaaaatcttggcttgttatccccacctaaggatgtcattctcgtatccctgtccagaactattttccctccatcttaatactgaccctctcaattcatcttgatacatgttctttacgtctctctctctctctctctctctctctctctatatatatatatatatatatatatatatatatatcatgtatgttgacaaaattagcaatattttggtgtgattcacatctttgaatgctctacacttcataacattctggtagttgtgaggattttcatgagaatcagcaattcattgccaggcaaccactttggttaagtgattatggacaaaagggcagggacttcagtgcaggaatggaatctacttgcaaagaaggatctgtgcaacttagaatttcaaggtctctagcttcgtagaaatttgccatatgtagcatttttggattttaagagttctattctttattttttcagtcaataacacaactttaatatcagaatcactgaaggtttgtgaattcaattcttgttggattcagccactaaaaagactagattttgagctatgcttttcagatatcttgacacatgttacataggagtagagaatggcatttttacaatatcagtagaagcatttcaaacccttatccagattttcatctaggattcaaagtcctgagctcattattttacttagtaaaattctctagcttaattggaagcaagtagccaatcctattagtcttttcatctactaaaggttccctgatgtcaactgtttggtcaccccaaaccagactttctacaggcagttgatccagatgtctctggggggaattatctgaatacgtcttgccctaaataccatgtacatgaacatcagctgttcttttaaaaaatgaccaaccatctactgtattccacaaacttctttggtcctagagacatagcgataaccaaagcaaagatagtccctgctctcatctatcttcgttctcatgggaaagatggagcaattaaaatatattctttacagcttaaataatttatgcaatttattagggaatcaaattggataagaagatagacattggccagaaggtactgacagttctggaagtgaaaagtcttgcctcgtgtgtttcagtagagctcatgagttgagactagcaataggtaaaatcagtgcccctaactttggagacaactcgacttcaaatagaagtactgactacttctatttttgattcctccccctagtatggagagttgtttgggaaatgattcaatagttatttgtagttcctaaattctcagcagcagttgcctcctgatatgtgtcactatatattctgagttgacatctgctatctgaatcaccaaaatagtgccttgttttaaaatttatccacgattggcttatgttttatcttacttgaggccatgttatcactacatgtgacatctctgtatatgtgtttgtgaaactgggataaagttggcaaaacttgagagagaggaaactctctatgaaacatgtttttcgttatagaacaggaggcataagcacatttggaatgaagagcagagaaggcaaagagatgccggaagaatgggggtctcaccaagcaaagaaaaatcaagtagagagagaactcaggcagctaggtgacagcctttgcaatctggacaaatagacaccttattatggtatattatggttggtgtattatggttggtgtacagctctctgtagggagagctgtagccacaccttcttaggggctggctacaggtgtgcctgaccatgcttgtgagggcgtggtcagagtgacgtagtgtgactgcatttgcnnnnnnnnnnnnnnnnnnnnnnnnnnnnnnnnnnnnnnnnnnnnnnnnnnnnnnnnnnnnnnnnnnnnnnnnnnnnnnnnnnnnnnnnnnnnnnnnnnnnnnnnnnnnnnnnnnnnnnnnnnnnnnnnnnnnnnnnnnnnnnnnnnnnnnnnnnnnnnnnnnnnnnnnnnnnnnnnnnnnnnnnnnnnnnnnnnnnnnnnnnnnnnnnnnnnnnnnnnnnnnnnnnnnnnnnnnnnnnacaccccatttgggacaggctgtgggttccatcgggcccgcggcctaggccattaaatacccttatatttctacctgaccccatattggtaatttcccactataggtctctgtgtggattagacagtccctttagaataaagccttttcctagaggaagaaatcagttaatagtgattttcatagttgtgttctaggtggaattttatttgagggctgttttacaaagttagacttgacttggcaaacattgattgtcataggttacattctctgattaacacttcctaaattggcagctacttcagatagaattaaatgattgggtacataaatgtgaaagatagcttattgtttcccagagatttgtgttcacaaatttcacaaatgaataaaggaatgtctagattatcacaattttgaacaacattgttacttttatgtctatggatggaggagttatcaatgaaatgcccacagcacttagctaacaattgctttttctaaaattcaaacacttgttaatccatgaaataattccccagcctactaactcctccctaccaagagatcacactgtccttcagggcttgtgcatgtaaggattagacaaccccagttctaaattttctgtccatgttagggctgtactctcattgtggtttcagaatagaaaaggctgttgagtttccccaagtccttctgaaagaagtggtatggtttagacaagtcaatttttgactacccctactctacaagtaagccaaagacttggagttcactccaactaggcataaatgaaagaccagcattctttgtactccaaggcactgcttaatgttcagaagagaaagctgaaagggcattccactctgcctttgagctgtgctgtctttagaaggtgaatgacctaggtctggggtttaggcatcctagcatctaggcatctcaggatggctctgaatgtgaatctaacccagactgcacatctgggtataagctatttctacatgatcttaacatttctgttgaaggcttgtaaactatacaatccactggcctatcagagggcaaatcaaacaatttaaccacatttcaatctcatctccaaaaataccttacaataaaagttgattattttgcttatcctgctttaagatatattaattaagctgtaagagaaacttctttttgctttcagctcattgcatgagttttggttatgcattcttctctcttcttcatgtcagtctattctgggtcttgttgggagcataggcaggtggacatgaaaggcccccatgtcttctagacaatgcagaccttgcatactttagtagaagggactctcgtttgttttatcaggatttgggaaggcggaacaggattataagaacatgtgcttcttgctggctctgttttgtcccccaagaagctgtaacagatatggatattaagcaccatttatacccacatattggtggacgtggaacatttcaataattctgtctggtttctgtttgggttagaccttgactcaaaccagcttatgagtgggtacagttatatctcggagaacagtttctcccccattggattcctgttacaaatttcaagaatgaaagatatttttcatcactgtaagtttgctagactgataagatgtaagatgaaggaacagtaaaagacacctctgtattctgaagcatgtggagcttcctttcagaagttggctttattggcagtgaaaagtcccctgataaccttgcagtgctccccttattgaaataacacaaattagcattttactagggaggaagaacacacagagttacaagttatttaacatttacataaaattacggagtaaactccaaacaggtcgcctccaaaatgtataattacactcagtagtcctgtcagcacacatagaaacaattttatttccaatcatcttctgcttttattaactcagggatgtatcattaaaatttccactgaacaatgaaccttaataggtgctaatgcaattgtgaattatggtaattgttacctaaattaatctctgtactttccattccttattgccctgtgcataaagagtatgaaaaagataatgttgaaactgacatttatatgaatgttttaaaaggcttatcttatttgataaaagttgtatatgagaactttctaccttgaaaagtagttgtcttagaaaaatgatatttgttgtaagaaaagtttataaaatttgctctgtgtgtgatgcttggaggaggtatatacagtcacactcagttatgtgcatatttttgttttgtgccttttcatttgctcatttatatagcacaaacataagcttttaaaacatttttatttatttttgaggatttcataattgtatacaacaattttgctcgtatctaccccttaggttcccctctccaactcttcagactctcttcacaagacaaccttttccaaactccatatcctcttcttcttttaacatcccatagagtctggttagtgatgcccatgtgcacacagggatgaagctatctactggagcaaggacaaacctactaatggctatacctccaaagaaaaatgactcttcctccctcaatagccatcaactgccaatagcaaatcagctagtctggtctgctgtccctttccaattatattttaactgggctacaagacagtaggtttccatattgctctttcctacaaccttcattttggtaattcatgattcccctttgtttccctcaatccatttgtacaatgaagtctatggttttagactgatttgtgtcccttccaaactcatatattgatattgtagctatctaggacttcagaatgtgactgtgtttggagacaggacctttagagagacatttaacttggggtgatatgggtgagccctatctggtatgactaatgtccttataggcataaattttaagacagatacacattgagggaagacctcatgatgatagaggagaagacagttgtccacaagccaaggaaagggaaccgagaagaagctagttctgtcaatacttgattttggacttctgtctctaaagctgttcaggctacactgtggtatttcggtataatattgccaggaagctagcacatccatccagaggtaaagtaaacaaatattgactttcatcttgttgcttttgctactgaattctattgaccttggatatgacatcaaatctttccatctataatgagctctagattttctgtgtttatatttaaagcattcaacaccatgttttctcttaactgtaacccgtgtttctctgagaaaacaagtgcccttcactcacagtcttctcagcatctgcgtgggtgatctaacagcctagctctagacatggtatattacttagatctgcccccacagcaagacccctgccgtcttctcactgtgattggctcacagatgaacaaaggacaacgagattacatttctggccttaattagaaaccactgagcaatcagactctcccagaagctgataatgcctgagggtgagggtgaatgtcacagctggctgaagccccagttgaagatcaggctgagaatgaagacgataaggacacagatggagaggaacctagtactgaggatgctgtgtgaatcttatctgaagccagcaattcctgggaacactgacattttaaataagccaacatatccctccccttggttttgctgtcaaggcagtttgacttgcatgtctatcacactgctaagcaccttgtgtagtagaatggcttaagactttttctcttcctctgcaaaatgaatgtactgttaatagtagaaactattttttttccaaattaaatactctacagaacagcaatacttctctggtgtatgtatgtgtaaggcagcagggatgagagtaataaataaatctgacctattcggtggtcctttaacccttaaatcctgtgtggaaagcaccagtgagatgatgtaaggacccctggcaatacagaaattactgcatttacacacttctgaacacttgcggatctgagcagagcagagagaaaggaataatgcaccaactggtaaagaaaacacagactccagagctcatccatagacagaagtcacacacacacaacacacacacacagagagaggtcatgcatggacttttccctccctccatgtgtaggtgtagctaccaatgaacagaggtgagaaccatttataaggggatttaacatcaggaaatttgatgtgatttctggctggctctggcaggctccaggcagacaagctgatgctgcattggattcgaaatacttatctagcacactctgggtcagattgaaataacaaaattctgagagaaatctcactgagccactaaaacattgtacaaacagatgaagagcctaggctcaagttgagtgttgtataattagtgatcatattgttatgggaaatgttttattgagccaattctgagatgagtgttgccatttaatctccagtgatttttaaccaaatgtgaaagagcctttggaaaaatgcttctccattccaccgctctcaaatgtgtgcagtttgtaaacaatcctgagcattctgacattgaagaaccacttcctgatgaactctggctctcagacacagagcatcactctggacaaatgaatcaaaagtgcatttgctggcttctatgttgagccttttggatctttctgaacctaagttctttaaactgcagtttaggcaatccagctagtttatgtaatcacttccattagtgttgcctttggttctgggagttgctttagctctgattttgtttaccctgcatagaattccaagaaggcttccttggttatttgacaaatgttgattgggtgcacactatgtatcaataactgaaaaagatggcggccatacaatgagaaaaaagacaacgggtttgagtgcctgaaatgtatagcctgattgggggtggggtgggatttagacttaggcaagtggtaaaccagcaagaccttaatgcttctcataggaaaagattggaattgggagaggattctggaaactaggatgcccctttggccagtgcatcttggtgcaaatactgaggcttcaggacaaaggaaacacagagaaacttagaactgtgaagcatataccatttcttcatcatattccacacacaaaagtaaaaatgtttctcaggtagaaaatatatgaaggaaccataataaacctccataataattccccagaaccaggtttggggggaggatcagaatgatctttggagacgtagcctcggaccttaacttcattcaaaacggtgatattttgttgggcatggatatctggaattttttcattttggatacattatttttggagttttagagatactgtatgcatgaagatattgtttgcttgatcactgaggtattatcccaccatttggcattaaggattaaacttattgctccatatgtgtaaacaacagatctaccactgagctatatctctaactcttttgtaaattttattttgagttgaggtctcatctagttgaccaggatgacattgaacacattctgcagccaagacagggcttgaacttgttgattctcttgcttcagtcttctgagtttctgagagttttgatggtacatttaattttaaccattgtataaatatgtcactcatctcacctaatctcagccatggccttacactctagtgagaagcctgttgataggaaacggcacagatgttatagtttagtgcacatgagataaatgctcttattttatgtatttggcacattatgtttgcctatgtacaagtgcatatatgtgtttgtgtgtgggtgtgttgtgttcataattacccccttttacctgtgggatcctcatccacgtactctatcaatcatgctgaaaatatttaaaattttcatctgtatttagtatgcacagactctgctttttgttattatgtcctaaacaacacagtagaagacaatttgcatagcattttgcaggaagcaaatgaagtcctgagtattgttgaccatggacttagccatgcaaggatcaatgcctcatccccatgagagtagcaaagccttccctgggtgaggctcagagggatgacaaagccattctctggtctgagtgctaatgttgatactatatgcagaaaatgtccttactaactttcttcccctggattttatggcctggataatgcttccctacagagactttctaccaggattagctaaacctgtctctttgatgcagctatatataataaacgttaccttcttgttcggctgtttgcaataatccacctgtatacagtaaacagactgagattccagggtgaagcagcttcttcaccagagaaaccagaccacttgattccagagtttctgtgtatgtatgtgtcattttgttagtgttgtcattttttttattccctcataatctctagtcagcattctgggatgcaagccatgtaaggacatggaaacatatgtcattgtgttagtaattataagtcacttaaagataatttaaagcacatgggagaatgttcaagcttatatggaagtactacattattctatataatgaatcaaaccacctacacatcttggcctctgtgagctccagaaagcaaatttcctcagacactgaagttcagtcaatgtgtaagaattgcacatacatgtatataatgataatctcataaacctttacaaaacataccaaagaattgggagactacacagcacaaaggtcacatcatttctgacaacaacaccccagctctttgctacatatggctctgaaatttagtgttgcctgcatctgtcctaggtggccaccaggaactgtgggggcttgtaactccttggttcttaacttgagcgcatgcgccttaccttgagaccactgtcaattctctctcttaatcctcacctgttataacttctcacacctttcgtttcttgttccccctctgctcgtcccaccccccaacccctcaacactgggctttctttgtgtttcttccctgactaggattgcttgtatgtatctgtttcccaaggtattcctctcccatctggaacatgttctagaagcctaattaacttgtaaagtgtgtttggtttggatggcaaacccatctttactccctgtgatttggaccttctgacctttcttcataaaacactcttgtcctatttgctcccctctgctcagctgtcattagtttgtgttgacagttttattgtttcctggtgacctctgtctatccacaattactatagtatgtagcaacctatttatttcaaagctaaatgggtagaataaaaacaaaacaaaacttcacattacagggaaaagagtatcccaactcttaaaatagaatccatattcatgtaaatgaaaatcacagtttaatttatttagctaaaattaatgagttgatatctaaaacacacccagagaactgttagtaattcttaactcatttaaactaccagagtcttcaaattattcttacaagtaaacaaatatctcatgcaaaaaatttatagaaacccaaatcagccaaataaaggacattgcaatgattcctaaataaattccttttgattattggaaaataaatgctggtgattctttatttaaaatggctaggattttacataaatttataattatgaaacctatgctatataattgtatgttgaagttgaagcaataaagaaaaccatatgtacagaatgaagtatgagtggtaagttttcagtctttgccttgaatcacaggattcatgtaattagacccagagtatactatgtggcagcttcacactgtcaaatgaaagatgggggctaaaggtaacgacacccacactgttacctaacagtgacacagctcagcatcatgctgggtatagtggtattgacctggcctaacaatgatacagttcagcatcttactaggtatagtggtatagacctatcacccataggactgagaaggttgaggcatggcagttgcaaattcaacctagcctggactacaatgaccgtatcttaaaataaaatcaaatcctaaaacaaaaagctagcataacatagccacacagaaaatatttaagaaaatcagggttttttttgttgttgcatttttgctatgaattcaaatcataacagattgttaggggattcttaatttgaaagggtaacacaaatatgaaagagagaaaactctactaggctcctttggaggctgtgctggctagttttatgataatgtgaaacaggctagagcagtggttcccaaccttcctaaagcttccacggtttaatacagttccttaagttgtggtgaccctaaaccatgaagttatttcattgctatttcaaagctgtaattttgttattgttatgaattgtaatataagtatctgatatgaaggatatataatatgtggcccaaaaggggtttgaacccacaggttgagaatcactgagatagagtcatttgagagatgggaacctcaattgagaaaatgtctccctaaaaatggtctgtagggcctgtaaggcatattcataattagtgattgatggaggaggacccagaccattgtgggtggggacattccttggctggtggtcctaggttcataagaaagcaggccaagcaggccatggggaacaagtcagtaagcagcactcctccatggcctttgcatcagcttgcctccaagttcctgctttgtttgaattcctgccctagcttccttcagtgatggactatgatgtggaagtataagctaaataaaccctttcctccccaacttgcttttggccatggtgtttcattgcagcaatagtaacattaactaagacagaggccaaaaactttggtggtttttacatgcatgcattttatctgtctacagaacacatgttagactcaggatggagattttgttgttttctgtattccttttatagttgggtgggattcctgtctcttagaaggatagataagaagttgcaaagtgtctattttgagaaatatgtccttaacaatttatctttggattacttgatatgtctcttatgtgtcacattgtcccgtgccccagacattatcctgagcttcttcagaggagtgatgggagtccaagcgaacattctgctgatgctgtgggattctgggtaagaagcaatgtgagaggcacccagcattgctgcctttggcaattgtgattccgaggcatattgaagcaaacacgtgatgctcccaacgacaagacgatccagataaatgctaaagtcttgcagctttcaaagttttcaaagccaaagagagtgtaaggataaaagatgcaccaagttcctaagtcagctcgtacatgctctcagcgtctcttcttatggctcctggctaccaacaacaaatagtatgtccagacactccaagccgcctcatctgcacatgggatattctgtcatgcatgtggactctggttttcaaagctgagactctctttttatgtgacttgctttcttttaactaacatggctgtgggtaatgaaatgtgcatccttacaatgtcagctgcaacagcaaaacagattttcatcttaaaagggaatcaaaatgctttagctaatcctgctaagtggacatttacattacttaccaagaacttccactgttggttacaaattaacatagaagctgcttttcaaattgaatttatttctagctgatacataaaaatgtgaaaatagtatacattaacgatacaacatgtttttgatgtatatttacaatgtgcaataataaagcacatgtataaatatgccactctccacagatgttgatcgtttctttatgttcaaagattctcaagctctatccttttgggtctttggactatttgcatattgtcatttgcagccaatgaaatagtcatttgtgcttgtatgaaacagttcaccaggattctttgccccacctaacttaactaagtacctattgctcagctttttccatatccttctatccccttacctccctggttctactctaagcttttacagtatcaactcttttagattctgcatatgcaagattacataggtcttgtttttgtgtgcatggcttatttcaccaactgcaatcatatccatcccattgttgttgtaaatgacagaaatatctatctgtctgtctatctatctatctatctatctatctatctatctatctatctatctatctatctacctatattttgtgtgtggctgaatagtattccattgctcatatagtaccagcttttatctgacatttttttatttcaaagtctattagtaaaaataaaaacattgatggaagacccaaatgactagggcaggagccttatgaggtattgggttgtaaaagtcattgtataaattgtctcataaaacacataatttaggctaagaattgagtatgagcttatatttgatcataagctaagatttatgcaccctctccaccccccaccatgacaggatcttcccatagagcccaagttagttttgaactagtcagtctcttttatcagcttccatggtgctgggattacaagtgtgtgcctagctgtacaggttgattttatttgaagtatatcttcctaagaacagtcttaatgtgggtttttgaggaatacaataggaagaatggaccacaaacttgtaagcaaatttactaagcctggcctttataccatgccagtctagtttacaggagcacatgtcacacagcaacactttcccatcttgtttccaattaaagttggccactaaattctttgggtcctaagatttaggtggggcttgtgatgaagaacacaacttcccccagatcagttgtggcattgttggtgggcatcatgacaagaagaaacaagttctgttgtattctcaaaaggtcatttgtcctgctctcatcctcaccagcctccttccacactgcagtcagcttatatcattagcaccatggttacctacagcatcatcctggtataatgtgatctttacttgagaccaaccatgccaattctacttctcagattcaatagccacaataagagagagagaaaaaatgccaacatgtacacacaagcacatagaccctggaagtgttggcgaagatgcacatatcagtaaagccttacctaggtataacatggtagctctgaggtagtggttcctttgcataaagagcgagacaccatgaaactagcatgagagtcctaatggagaaggatcttatgtacagttagtaatctgaagttaatagatgtggacccctcagaatatatagagtgctcctataagaaaatatagaaaaaaactgggcaatgagataggaagggtatggaaaagtgagggtagtgttggagagacaatttagcaggtaaaggcatttatgtcaagcctaaggaccccagctcaatccccaggattcccatagtgaaagaaaagaagtgactcctgagagttatcctttgacctctctatatatgtattgtggcccccctctctctctttctatgtttctctctctctctctctctctctctctctctctctctctctgtgtgtgtgtctctctccctctctgttttgtaattttaaaaacaagaaagaaataaaagtagaggtggacaaacagctttgccagcttagaaaaatcaacctcccgatgaagatggcagggctgggcagggtaatgatccttgatagatgttacctgctaataattccagcagataaagagagccttgtcttctgcagagaatatatactcttgttgatgtgatattgaggaatgtactggctgtgaacccgtctctagtcaacagtgtgatttcttacttagctgttgagtcacgggttgggcagttgctctgcagaattcttatgctaaaatcccaaccagtgtgactatctttagagttggaacacttaagacacaactgaagtaaaatgaggtcataggagttctaacctgactgcttttcttttaatttttcttatttccttttatttaaaatagacatttttcctcacataatataccctgtttactgtttccctcactatattcctcccagtttcctcccaactcacctcccactggacctatcttctttctgtctctcattagaaaacaaacaagcttctaagggataataatcaaatatgatattgtaagttaaaacaaaaattaacacactggattaggagaaaccaagcaaacaaaggcaaaggacccaagaaaaggcaccagaaacagatacagacacagagacctactcattcacacacttgggaatcctgtaaaacactagactggaagcaataatacatatgcaaaggacctatgggtaaaaagagaagaaaatataaataaaataaaagttaagatcaaatgaaaagaagaagaatgaaaggaaggaagaaagaaggaaagaaagaagaaaggaaggaaggaagaaaaaaccctgacatgacactatgggataaagaacctccagagatggtgttgagtttgatttattttggccatctatgctgggcatgcagcttagagtattctgtttctgtagtgagactcctttggagaaaactaaattttcattatcaagtggctatcaattggagataacttccagaatagggatgtgggtatgtgtctacttctttcagctctaggatcccatctgatacagatttgtgtgagcctagcgcatgctgcctcagtctctgtgagttcatgtgagctttgttccattgatttagaggaccttgttctcccggtgtcctccatcccctttggcccttacagtctttctgcctactcttcctcagggtttcctgagctctgaagggagggatctcacatcccatttaagactgagtattataagatgtctcactatgcataatgtctggctgtgtttgttcctacctactgcaggagatgctggctgaggaaagccctggtctatgaggatagcaggatgtaactgataatcatataaggaaagaggaggacacagacatgcctggagaagaccatgtgctgacatagcaaggagaggcttgggtgaaatcaatatttccagcaccttattttcagatttctagtgttcagaattgcaagaagatgaatgaatgtctgttgttgaacccacaggaccttgcaatttgttgcaccagcttatccaaaagaatatggtgtcatctacaaatacacataggtctgtgaatagtcatttaagctaactttgcaataagcacttcttggacttgggcctgatatgggatgtcctttggtatgctgtgaatatgcgttgcttttattggttggtgaataaagcttttttggccaatggccaggcagaatatagctaggcaggaaatccaaacaaagatgctgagagaaggaaggtggagtgagagagatgccatgtagctgttaaaggggcaagatgccagaacattacctaccagtaagccatggccacttggtaatacacagattattaaaaatggattaattaataagagagagctagccagtaataagcctgagccattggccaaacaattataatttgacactagcctctgaatgattatttcataagcagctgtggggacccagtgtgtgggagagaaactgatccagtgagacccagcaaaacagacaaaaacttccaactacatgagccctcaaccatttaggatagctcaagtttccattccatcatatctaagctgctttctggaccttggtctccattgagaatcactgcaacactaacatgccttgagaaacttattttcagtggagatgtccgaacaaagcaaagaatgttcagaaagggtcctaagaagcacagttgtgtatttactgagaaggagatcacacaggacttttgaagggaggaccccaggagaaagtcccaacaagtactgcttggtattagctcttcttgggatcagctaactgggtaactagcataatttttgtttttttccaactagagagttggcttgtgattcttaaacttaatgtgagcagaaatcagccaaggatacaagctaaaactcttgcagagagtgagtagggcaagtgtggtgggattcatttggtctccagccgacaggaccaaagaagagagcagcaattgcaggtgaaatggggagagcctcttttgctttccttcctagtgtggcccttgttagtaggaggaggtgtggctgactggatgttggccagcgggaagtgtccctgtttctagttgtgggtattaactttgttctaccctaggccctttgagaaggctctgtctgttactgtgtgctgtcttgtcatctggtcctgcacagtggtccccatgagactctggtaggcattcaaatcagatgcccaaacacaagggggacattagtggggactcagaaggggcacctgtgagtcacatgtcttattcccttgggctgagtagtcttgtggtgctgtgacaagctcctcagtctttgttggaacctttgtttctgtagcagaaatcactctgaacaaaagcctagggggaaagggagaggagtcacaggcctaagactgaatacatgactcatttctttacttttttttttttttgccgcctgcctgtatccttctgtgtctcaagatagaattaggacctttgaacaggcagctgacatcacaacccctcctagccagggaaggagagctagctgcttactgctttcattttttgacacattccttcaccctgtctgtttccattatgggatgaaagctaatgctgaattgaagaaaaccagcagttgtgactgtgacttctatgtgtttctgacaaaactcaagcttgcatcacctactaagtggtaaaatgtgggattctcatttcttcttctgtgcctgataccttccctaagccagaatgaaagaggttttgtttttattgatctctacattattctgcaattgaaagagcagtgtcccaccactgcagagtcaggtgtaatttttttttggagcactgagaactcaataggcattggtccaccaagattagctgttgacagacgaaaggaggaaataaatgcattcaggagctccttttgtctctcaaaatataggcacgactcttaagcttacagctttttgctaagcccctactttgtatgtcaaatggtgaatatgacatcagtcttcatttttatctttcttctccaacacatctccttaagtagatggatgctctgagacatgtgctggggaatgcaaaacaaataaagcacattaatattttaagataccgtctccacgataggctgctatattataaatgataataaagacagataccagaaaataaaagaaagaacatggctttgaaggagagacagaagagtaaatagcaaattctaagtactcaaagtatttatttatttatttatttatttatttatttatttcagtcctgcctggggaaaaatagctggaaaagattagttatagaagcatagattctgggagatggcaggtagtctggaggatgtaatttgaagccccctagtgcagggaatttcttgatgcatagaaattagtttggcaactagttgagctagttatctttgctcttgtaagggatttaagggataagttaaggtatttctaagatgactgaatgatggcaagcaactcaaaaccccttctgccttgactttttccttcgatttcaggcagttggttaaaccattctcttcttggtttgctgacctcccacaagtggggtagagaaaaaaattgaaggagagcagagctctctcagaataagctttcaatggtaagttaccgtatcatttcctgttccctatcaagatctagcatctttcttctcctgcgtcccgataatagaagggctgcctgctgggaggcagctactgtccgaaggctgcacaccttctgtctcatttcactattcctcctttcttgtttcagtgggtactgagatgaaaggagggctcagagctaggcagtggatgactctggtatgtgatatggatgactctgtggtaggaggccatcaggaacttcgtggttgccagcagcaggaaggatctcacagcagaaaggcttcaatcatggcatctgttattcagacacgctatgcaggcacacagtgatagaaaaatccttgaagattttggaaactttataacgggtttaattatgtgcctcttctttgccttgatttccaaagaagtccctgtttagatgaaaggttgtcaccagctttacaccccacctttcccacgggtgtaagctgtgcctttattctttcgctacccacactctgagggggcacacacctcagcattccatcttccttcttcaaatcctatctttctcttaatctttattttgcaggaacagggacacaccatcactttttttttttaagttctgcaacaaaggtagacttcgagtctgttctggtggcgtggcttacaaatgcaaagtttttaaagatgcctttcttgatgaatccgttagtggtgtgttggtataaaagacaagagatggcagggtggagcctgcttgcctcctcagcacctctgctcccaatgtacacatactgttgatactccagctcacagaaaaaaaagaagatgaaaatatttcattgaaagatgacagctttaacgaactttaaaggttaaccccagtgctagttagcatatctattcatgtctccatcagtctattgaattactcagctgaacaggcacacaaaagcaaaacttgaaaaaatacccagaaagccaacattaataattcataaatactggaggcttgtgactgacaattcccccccacggtgttgaaatctcttaagaagcaaatcctgatcagtcctaagtttctttaggagctcactgaacagccctgtcccaggatgttaatgtttctgtaagtggttagtgtcctagacatactgtagcttttcatgccctcaagcacatgttctgttcctttggattagtttaaggtttggcttttcataagatatttaactgacagttgctatatttgaattttacaagcatctacagaccataaagaactcccaatacagccataatcccttgttgcaaaggaaatcggcatttctgaacagattccagataccaattatggcattaatgaggatatacaatcacgtctgctcatgcaggattagaggcgactttgctcctgatggggctgtcctgctgatgatggtgatgcagaaatcaccatccttctttctccatgtatatcaaattgtattcattaggccttttcattaaatgtagaagctttcaacatctttcagtagtaaccatttccatggggggaaagaagggacacgtgtcgctgcctgacaatgagctgactttaagctcttatgtaggaagaaggaaaactcagtcttgatgttggaaattgttggccaagtattcccccggaggattggggccatggaagctcatgggtgctaacggaacaaactagctttctcacctggatttgcttaaaggcagtttctagaccgtgggctcaaggccaatgtttcctccacttatccaggtgaagtttccttttatgctttccatttcagaatttttaactgatagagctgccctggagagagagcagggtggcttagagctgagaggctttctcaggttggaaagagtgttttttctgacacgagcatttctgttactttcgtaagccaacttttaaatgtgaatctgtgctgatgttccagtgttaaaaatccatgcttggcttcctgcactgtaccactgaaatctggcttctgttcaggacacttaaagaaataactcaatctccgtccttgttcacaatgagcatgcttccatttccttcaagttgcaattatggagaccatcagaaattactacattagcccaagtttttccctatgtgcatcttaatggcccggatggtccttaaaggacttcattttcagggagattgtgaactgcagagtagatgttcagaaacaggtgtctgatcagcttaggcctctacttctttggtaagcaatgaaggcggccccagctaattattcagtaccttcccttggtggagcactcacgtggtgcagtgaatgtggactactgtgtgatagatgttactgcactaactgctcactaacaatatttatccagtggggttggcacgtggagtaaatgaggtgatctagatgatactcagtagaagtagaagcaaatagtgttattagtttttattttagaataaaacgatctttaaaaaaaaaccttcgccttattcaaatttcagtctaatttaagaatggaaattgattctgctggcttccttctctgtgcccctcccataatgcagatcacctgtgctcagtgctgtctgacagcaattggttcaccagctaccctgctcttatctcagtcaaagctggggttcaggttaagggcacaggattacatagcatgcccaagacctaggatttgacctctcaggttgaaaacataaattaaaaaaaattaaaagaaaaaagtttcaaagattcctgatataatatttaaatatttagtgactttgaaatgtcacttatccatttattatatgtatttaattatagtaaatttaggattaagaactaatacatatgtgcagagataccttgtccagcctagacacaggggtttggggatggagaggtgccttggtcctgcctcaacaagataacgggacagacttagtagacttctaggggaggctttaccctctctgtggagcagatgggaggtgggagggagtgaagggagtgggaggagtggagggaggggaactgggattggaatgtaaaaaaaattaattaaagaacaaaaaataaaaaagaactaacacatatgttaaatgttatataaatattgacatttagcttctcacggcagtcctatgacatcagtattattaatatatgtgttttttacttgaggaaacagaggcatgtaaaggacagtgaacagtacagaaatcacccatgaaatcagtgcttacatttccactcagacccaggtaggagtcataggatttgaaatgttaattttgctacttgaccattcaaatgaaagaaagctacatgtatgtgaaaagagggctctgccacaaaatgttaatgctgcttccttttcttgaggttcaccctcaaagttgctgtgaaaacatctcatgagatttttgttactgttctttctggtctatattggtgcattttccctttgtcatttgtttttaatgttttacgagataagtaaaagccagacaaagccaaaaggcgttcatggtctaagggagtggcacagtggataagctttgtgcaagtgagggtatattcactttattaggaatgctaagacagtgcggctttatttcaaatccaaatttaattatcatagatttggttataatatttcttcacatacttgtatagaattgtatatttcattagataacctatggacgtgttttcttgggtcgctagtgactttctgtaagttacagagacacataggacaaatggctcaaccattattactcagattgataatttttcaaaattgatctttgaaattcagaattttcccttgctcaacacatatgcaataaaaggagatctatttgtcttttttttccccttttgggaattgaggcagcttataacacagcaaaccaaaatgaaaacgacaaaaggagtgtaaaatatcaggagcaaataaaaacaatagcataattatatacattgcaggttccaacttccttgctgtagctgactttcacattctgcttatcattacaataattccttgagggtaccaagtgatgtaatagaaactgacgtcaatcacattttgtgactgacaaagcactagacttcatatggcttgactatatgatgacatttgacaaagctaatagtgaacatttttctcacaggtttggccccaatggtgccagatagaaaccttttaagtagtcagtccagctgctttgagaattgaatgcatagagagattagtatagcacagaaatacttgtgaaatgttttctctatattatagttattttgcaagagtgccattaactttttcttccaagttttctgaatgcctaagcagagcatggcaatataagcatctgtaatcttcctctctactcttttctatgacctatatagataacccttgaggatcaattagtccattccaccttagaaaacaaccagcgtcaaatacaatgttttcaaaggtgtttaaatttgtgtttcacatgtacagctaaacaagacttcaagtgcagcctgcagcaagaaaggacacagtaagaactgatgcttacttcatccttaaagtcatcttgagagctccataatcaaggctgttggctttaaagggttgtaatgaggagaagcagagactaacccagtgacccaaggaaaatgagttggtggaggggccttctgctctggtttaatgtccacatttacttgcacctggaaaaaaaaggcattatgtccttcatagagacttgccctttgtctttggtagaaaaaaaatggaaaagagaacaaaaagaaaaaaatgtgcaaccactatgactgaaattcatcagtgaagataaattctggggttattgataatgacactccaagctagatgcttaatttttatcactagcttgaacttactgtgtttaaaataacccagaagacagaactttgtgtctgtgttttgcatgactatgtgggcatgtctgtgaggatattttgagagaggctcaacacctatggactgggatttaggaccaaagaaaaatgtaaaaataagaagatatgagcaccggcttctgtcctttgcaccctgatggcagacaaggtgccaccagtagctcacattcctgccccatgtcctcctgacatgatagaccgaatctgtcctgaaactgcaaaccaaaatggatagcctttcctaactgtttgtgtcagacctactagtgcccacactgcacatggcttctctctgtaggaatgaacttcaagtactagattgaagacttgtcataggggcaaccttgaggtgcctggtcagatcaacttttagctaccacacgtgcaacaaatgagagttaatatcttcagaaccaggctagcaagtactgcacttcttggaattatttgagagtaaacattcaaaattatttttgaaacaaataacagaagtgtaatcttggaaggaaaaatcatgaaatctgagtagacaaaaaaaggaaacagagccaagcaacattctagcaagtgaaagatgtattcctcagggttcaaaaccaaactgggcaatttagtagtgtattagacacagcgatggggaaattggtacacaaaaagaatgaaaaaatttccaagagcataaagcagaaagactcagggatgggaactgtgagaaggagtttcccaggtgaaaactgagggagacactgtgccccattagattggcggatcaggggaacagacagaatggtggagacattcagagaggaaacggcaggaatgctgcagcccgagtgaaagaaattatcttcaaatgtggaagtggagtaaataaaatcacagtgaatgagaaaaaaaccaagtgtccactttggatacagtgacaacgtgcgcgttgtgtggagatagggtcttctcaaacttcactaggagatagtatcccttttaaagaaagattctcccagggaggaaggaaagggcatgaggagagaactagaaaggacagacattggcagctctactgtcccaacttgatctctctcatggtgactgaccttgctggaaggaggcaactgtctcttgtcaagggagtttgggaataagtagagcaaggagtggagagacgtgttcataaggataagtaaaagccaaccaaacacagttagaaaatcacgtctgtaagacaaacccaagttcagaaagagtacaggaagcccaaggcaggggataaaaaaaagattgttgggctggcaggagcatataaatattgcaatacagcagcttaatgacttctttatttctctttcatttttggatgggtgggatcaaaccaagggcctcacacatgcttatgaagctctctgtctccgagctacatctctgtcctgcaaagatctctgagcacaccactctccatactctcatcatttgcatgaacctgttctatattagatgacaccacgaaggtcattgagaaagaggatagtcatggaaggcaagtctgttttgctttctttttattttcattaacttaaaaaattatatttgattttattgtcaaaataaagcttaatagagtatttaaataattgttgtatatttttagcttaatttggacattgtaaggctattttaacattttgatttgtatctgagtatatattctgaagtgtagcaataagtagaatagttggtagtgccagtgatgtgactgtaagccctgactctaactctgtctttaaattgttagtatgagcttaggggaaggaaaaaactcagcaaagtccaaactggctccaagaatggctttccttcttagccagcattacatttttcacaggatgggggaaaagctttagtggctgcatgctgttcccgggtaatactttttagtaatgcaagagcttagttggctgggtaacttgattactctggagggcatgctattagcatagtgggaaggaatcaaaggaaaaaataatttacattaaggccacagacatgccatacaatacaattacttcaggttttatatccaaaaagctattatccttttttttttcattatttaagcactgtggtattctggtaaggggctttatgggagtcaaggaatggatctgagcccagaaaaaccccaagaaattgttctgtgaatgaaaaagtcctgatgttgggaataagtacatatagattttttctttgtagccttttcaatgaattatgcttatccatagataatgaatgcactgcttcttagcatagtttttttgtgtggaaatgatcatttcagcttttattataaaaatgctatatgcaaaaagaatataatctatacaatgggagagggaaacagtgtcttcaaatcattacatgatctcttattcaatgttattcacttatatgggagaaattcagagcagcctggaattcatattagtcaggataagtttggttatgctatagtaacaaatgaatccctacgtcagtggcttgccagggggcaaaaaatgcttaaatgtcattcattacagatgacctatggtgggagcttcactgccaatactaatctccaggctaaagaagtcaacatccggtgttggataccacctccccaccccaaaatttctagaggctatagtagagagaaagagggaacacagggcactcaaactgtctctaatatgcttacataagaagtagatgtctgtcgctgtccatcgattaagaataatcatgtctcgacaggatttggtggcgcacgcctttaatcacagcactcaggaggcagaggcaggcagatctctgtgagttcgaggccagcctggtctccagagcgagtgccaggataggctccaaaaagaaaaaaaaaaaaagaataatcatgtctccgtctactagcaagaggcaaggactgatggaagatccgaagttatggttccatgagcaacagttcactggtatgaagtgactgcaatgtgccgaggaggcagccaaagctgatttgtaagctccatgcataacatacatcatcatgtggcatttggctgtaatttcattctggtcttgattctacttggtgaataaccaacagaaacaattctcagattttagtctagcaagtatcacaagtatcagactgaacagaccgcacggcttttctatgagatctttttcttccatcagtcaatccttcagtaagtagttcacttctccttctaaaagcctgctgttgtgttctgtatagagataattggaccaaggccaaataaaaccttgtcactcaagattgagacatgtggtttgagtttgctgagaaatgtataggaccttacagtaatctaggtactagattactgtatatgatgcatatgatgcagaacatttgttattttttcctagttttttttatttgaattagaaacaagattgttctaaatgacaatccaagttcctttctccctcccgtcctcccctaccatccccgccaactaaaaccctgcctattacatatcctttctgctctccctggatggtgaggtcttccatagggtgtcatcagagtctatcgtatcctttgggatagggtctggacccacccctgtgtgtcttggctcagggagtattcctttatgtggaacgggctcccaaagtccacacctatgctagggataagtactgaactactacaggaggtcccgtagatttccgaggtctgctcaatgaaatctatgttcctggggactggatcagtcccatgctttatcccagctatcagtctgaggaacaagaattccctgatgttcaggtcagttgtttctgtgggcttcaccagcctggtctggacacctttgctcttcaatcatccttctctgcatctggattccagttcagttcactgataagttgtgggtgtctgcttctagttccaccagctgctggatgagggctatcaggtggcatataagtcagtcatcagtctcattatcaggggaaggcattttaaggtagcctctcctctgttgcttacattgttagttggtgtcatctttgcagatctccagacatttccctagtgcctgatttcttgtaaacctaaaatgtctccctctattatggtatccccattcttgttatcttctattcttcccctgactcaacctttctgctccctcatgtcctctgcatccctcctcttcttcccttctcattctcctagctccctccccctcttcccatgctctcaatttgttcaggggatcttgacccattctccttctccaggggaccatgtatgtctctcttagggtcctccttgtttactagcttctctggcagtgtggattgcaggcaggtaatcctttatgtctaaaatccacatatgagtgagtacatatcatgtgtgtctttttgtgattgggttacctcgctcagaatggtttcctttagttccatccattttcctacaaatttcaagattccattgtctttttccactgaattgtgatccattgtgtaaatgtaccacattttctttatccatttttcagttgagggccatctaggctgcttccagtttctggctattacaaatagtgctgctatgaacatggttgaacagatgtccttgttgtatgaatgtgcttcttttgggtatatgcctaggagtggaattgctgggtcttgtggtagactcattcccattttcttgatactgatttccaaagtggatgtacaagttggcactcccaccagcagtggagaagtgttcccctttcaccacatcctctccagcatttggccattctaacaggagaaagatggtatctcagagttgttttgatttgcatttccctgatggctaatgattttgaacactttcttatgtgcctttcagccattttagattcctctattgagaattgtctatttagttctgtaccccactttttaattggattgtttggtgttttggagactagcttcttgagttctttgtaaattttggagatcagccttctgtcagatgtggggttggtgaatatcttttcccagtctgtgggctagcgttttgtcttgctgactgtgtcctttgccttacagaagcttctcagtttcaggaggttccatttatcaattgttgatctcagtgtctgtgctactggtgtaatgttcaggaagcagtctcctgtaccaattaattcaagggtatttcccactttgccttctaatagcttcagtgtggctggatttatgttgaggtctttgatccatttggacttaagttttgtgcatggtggtagacatggatctatctgcaatcttctgtattccagcatccagttatgccagcaccatttgttgaagacgatttctttattccactgtataaatttagcttctttgtcaaaaatcaagtgttcttaggtgtgtgggtcaatatcagggttttcaagtctattccattggtctatctgtctatttttgtgccaataccaagctgttttcaggactatagctctgtaatagagcttgaagtcagggatggtgatgcctccagaagttcctttattgtacagggttgttttggctattctgggtcttttgtttctccatataaagttgagaattgttctttcaaggtctatgaagaattttattggaattttgatggggattgcattgcaatctgtagattgctttgggcaagatagccatttttactatgttgatcttacctatccaagagcatgggagatctttccattttctggtatcttctttaatttctttctttaaagactcaaaattcttatggtacaggtctttcacttttttggtcattgttaccccaaggtattttatgttgtttgtggcaattgtaaagggtgatgtttctctgatttctttctccaccaatatgtcattggtatatagtagggctacagattttttttgagttaatcttgtatcctgtcactttgctgaaggtatttatcagctgtaggaattccctggtagagtttttctggtcatttatgtagactattatatcatctgcaaatagtgagagtttgattttttcctttccaatttgtattccattgatctccatttgttgtcttatttagctagaacttcaaggacaattttgaagaggtatggagagagtggacagccttgttttgtccctgattttagaggaattgcattgagtttctctccatttaatttgatgttggctgttggcttgctgtatattgcttttattttgttgaggtatgttcctgttacccctgatttctccaagacttttatcatgaaggggtgttagattttgtcaaaggcttttttgacatctagtgagataatcatgtggtttttttcccctcagtctgcttatttggtagattacattgatgggtttttgattgttgaactcttcttgtatccatgggatgaagcctacttgatcatggtggatgatttctctgatgtgttcttggattgatttgccagtattttactgataatttttgcatcaatgttcatgaggggtattggtctgtagttctctttcttagttgtgtctttgtgtggcttgggtatcaaggttattgaagcctcataaaaacagtttggcaatgacccttctgcttctatagtgtggaacaatttgaggagaattgtattggctgttctttgaatttctggtagaattctgcactgaagccatctggccctgggcgtttttttggttgggagacttttgatgactgcttctatttcattaggcgatataggtctatttaatttgcttatctgttcttgatttaattttggtaagtgaaatatgtccagaaaattgtccatttcctttagattttcgaattttgaggaatataggttttctaagtatgacctgatgattctctggatttcctctgtgtctgttgttatgtccctcttttcattcctgattttattaatttgcatgttcactctctgctgtttggtaagtttggacaaaggtttgtctatcttgttgattttctcgaagaaccaactctttgttttattgattctttgtatggttctcctagtttccattttattgattttaaccctcgatttgattatttcctggcatctgctcctccagggtgcattggcttttttgtgttctaaagctttagttgtgctgttaaatctctagtgtgattattcttcagttttttcatgtgggcacttagcgctatgaaccttcctcttagcactgctttcaaagtgtcccataagtttgggtatgttgtgtctgcattctcattgaattctaggaaatcttttatttcttttttatttcttcctcaacccaagagttgtacaattgggcgttacttaatttccatgagtttgtaggttttctgcagttcatgttgttgaattccaactttaaagcatggtggtctgataagatacaaggaaaaagagataattgatatcaaagagcctcacacagttcctgatttggccttagcaggtgatcaacaaatgatcctaacttcttttataagggaagtcaaaaccacaattgaaatcactcaataagtgaatgttatgtggcaagattcaaaggcaatgatacatttctttctcttacacttattggatcagatttgcaatgataaagctttgaaggctttaattcaaaggtagagcttcatttcaagctgcacaatgaagatatagtaatgacagaaaaaataaaaattaccatttgtcttcccatgatgtaggctagcaatataagaaataacaaaagaaaatagtgagatatactatggatataattaaaggaaggtgatgatattccataaggagctatttcagctacatggtagcatcctgggatctaaacagtgtaaataacctggataaggggctgtgtagaccatcgaaaacttcagctttgcaatcagagaagcagcctccatgtcttcctgggaaaagcttgagctgaaagtgaaattcaaagaacaatgctgtcccttccccagaaacgttagttctccagaatccataaagcatcgcctactggttgtcagaactagattcactcaatatgttaccatttggaatgaaagcaggaacctaactgcatgttctaaatgagagaagttaaaaattctcatctgggaaagcctggacaaaagggctggctttggacaggaatccagatgtaggccattttggatgatagttcctgggtcttctttccagatgatggggctgttaaaactatttcccattctcttttaggagggacttaaacatattttacagtgtcaaaagtgtgcttgaaaagtgtcaagcaacagaaaaattgagaaacagacatgggaccctcattcatctccctcagaaataataggatggatactaggataaaagtctatgggcaaaatagctagtgagatgtgggtaagtcaaggttaggtggccttattgtccttgaagccccagtaacagccatagttagattgactagtccctgcttgtgaatttagatagttaatgacactaattttccattggaaattcgtatagtgatttcattccattgggcacatgctccactgaaacaactaggttgactattatttttattagacctagcctcagagccaaaagctgtggttttaccttattctagtgctccaaaaaatcacactgtctgagttaatcaaggcagtttagcctgtgcctaacagttctcactgtaggatgagaatacagtgctattgtccttctagcctccctccctctcattgaaacaccgactggagagctggttggccaattgtgaggactgactccatgatcagctgtcctgtcttgctgtctcagtgctgtgcataccataggcttgtagaaatcacctcccaagtgaactacttgcacaccaattccagtctcatagtttctttgggggaagattcaactgatgacaaccccagagctctgtgttctaaccagtcctaggaactgtacccgtgcagttctcatcttattgctaaaaggccatgagtcagtatttcatctttattatccttgtgtaatccataagaaacaagacacaggaagatagtaaatggcaaagcctagaatctatgaaaacttcactttctttcattgcctttaccaatccgataaattttgtaccttatggcatcccgtaaggaaaatatttaatctttctgtcatcctactttctaaaaattgcttctcccatgtacttccttcctcattataatatataataatatggtgctgtttttatcaaattcccctaatctgagaacttctgtagaagtacatattgccactgatggtaataacaggccaccagcctttccaacatcttaatgtgtttcgcatttcccaaagaatggcttgattgatatattttctccaagctcctgagacttgtctgcctccgtgtgagaggttgaagctttaagacgaaggtttgctcttggtgagcaatggcggcaagcagaaggctagcaacacatttagattgcaaaactgctgggttttcaccatggctcaaagatttggtcctaagtacagtctcaaaatatcccacttcccttcaccacacaattgatctcttctttggaggtcctgaggaaacagtgtgatatgtctgcctgttgtggtaaagttaaactcatggttttatggttatggccctttctcatctcttccctttcttgcttcctttttacatcacctcttcccctttgtttcaatgtttgtctcaggatttgtttgatggccatagaactgatcttcaaaaagcttaaggagaagttatggttggggagatgtgggctttctgggcttcctctttcctttccttctctctgctcctgcattgccctcctatctttctacctgccaccattctagctgttcgtgacagtgacctcatgtctatattttatgacattccagcccaccttcctccagttaaatgaatcatgttctgtgttctgcttccaagttcctgggggagagaacaaaatttatcctgatgacttgaagctgccatcccttgtactctggcagtggaggtggtgatatttatttaaaagaagtcaatatcatagaaggttttcactggagcagcaaaaaggacttctgtgttggctaaaatgtattgatcttatctacagactttttttgtttttgtttttaaagacaggattttgctattatataagccagcatgctggcattttagtgtatgctaccacatccagcataatggattacttatgcacattcaaggtcaacagattcctcaaattgtttagcattatttcacttaatccttgtagttaccatgagctgtagttgtagttgtttacaggtagagaatctgtgggttggcactctgctaaggtaagaaaaccaaacagtggtagatctcacaatggctccgttgtctagtgtctgggcttagccagtttctctgtgcaccaggtgaagtggaactactcattaggaaaccaccctcaatgcaggaagctttcctggatgtcactgctttctcacgaagaaaggaatcaagtgcatggagcacgttttcattttttttttcttttaatccacatcaggtcagcccagcccactgaaggtgaagcttgcctgctgatacataactatatttcaagatgagcaaagaaaagcctgtccatcccagagcagagctccctggggacaaggctcaaaaagcaatgaaaagggagtaagtgaatcatgagtgcctcagagcaaggctgagcactagagccaggcatttacagtgaagggcagagctgccagtgagaactcagggagcattagaaaaatgattacatgccagcctgaaatgaggctccgaggagcaagagacatcctcccacagaaggatttgtggaattctcccaattttcacagctctgcctgtggagtttgttcattcattcactgagaattattggttacctgtgtgatcagggactattcctgagttcctggtccacatgttggagtgggatgcttctgttttcacttttagtttttttgtgcagtatcacctcttactcaggcctctatctcctgtatggcctgcctaactcaggtaccacttcatttcttctgtaagttatgcttgctcattccttattctaaatgcctataatttgttgtcttgcaatgtgctttgcttcctttctaggatgcttagggtgtgtgtgtgtgtgggatagggaataagttagtgctgggaaaatgcaccattctaaatgtcccattagtgattatggttttatctgtcaatctacagagattttgcaaatttccatgtttccttgtgagccagtgtcttaaatcaaatgatgttgatggaggagacctgtctataatcaccagaaactgtgtattcttcttagcttccatacgaaggagggtaagctttgtcttacattgcttgaagcacagtaggatcaaacaagggaagagaaaattccctggaacatttaccaatatcatgtaggaaaatattgaagaagtcactgagaaaactaacttagtgatcatctgttacaactcagggaacttatagatcacttgcctgtgcgtggctcctatttttttctttttaaaattattctgaattttgttttgttttttcctgatcaaagacatgtatgcaaggggatattttgttcccagaatccacattcctctttattttattgtttgtaattatgcatacatatgtggggtatgagtaaatgtgaatctttacccacagagtacagaagaggatgctggatcccctggagctggagatatggacagttatgagtaccttctgatgggagtactgccatcagaatttgagatttatccaagagtaagaagtgttcttaactgctaagccatctctgcagtccagtatctacattctttacctgtacaataattgaagagcgtaagaaagttacatatacagagtgacactacatgacaaaacagaccaagttgcatcaaaaaagagctttattttttgcatacattttgtaatttgggggatgtgtacttggacattagagttttagtctcatttgcccaaacacaacaatattaatgatttttatattgtttagatttgaggtcttgatatttatgacctcaattcatacttttggaagtgcattagggattctgtatggtgtaccttattgtgtagtaaaaactggaaaaaattgaaatcaagagatatttctaggccaggcgttggtggcgctcacctttaatcccagcactcgggaggcagaggcaggtggatctctgtgagttcgaggccagcctggtctccagagtgagtgccaggataggctccaaagctacacagagaaaccctgtcttgaaaaaaccaagaaaaaaagagagatattaaatagagtttaactctattgaatagagttaaatatgttttataatcattatatctgcattgctagagcagcgattagtgaatacctacctcacacaagttagaacaaaagacaatgagggatgccactctgttttaaacctcagaaaaccaaactcgatgaggaccccctgaggtttgtataactacagcaagtcagggttttccagagtagctgctgaagaggctcaatgctcttctttcttcctatgctaaagtccaaagaaacagcagcatccttagggtgattttctttggggccttaagacagaggaattaggccacaacactgttggttttcccctaaaggcagatggagtctatgtaggaaacacagaagcagaggagggactttctcatagtcgctggtcttggtctgcagctgtgtcatcatgggagcactatgagcatctagatggttggctcccagcactcactgatactttcctttcctcagagagcctttgaaaagtgcagctccctgggcccctccccggctcaaagaatcagaagcttagggaatggagccttgatctcaggaagagcaagagcatccaagggtgatttagcttgagcagcagaggcttggcgtaaccaggattcatctattgacctgggatgagaacagtttgcactatgttaaaggggcatgctttcagaagaaaattggggttctgtcaggcaagtagaagtgtgggaaggatatttgttaagcattacacagtatattctaaaagagttttttttttcagtttggaaattttatgaattataggtaagtgttccttcaatgcctaaggagcaaggtgtggcattccccaacctgtcagagctaggcagccctccttgcttgctgttgaatgtgcatacagtttgaccaatgagtgtggtgccctagtttacaaaccttttaatattccccatactgctgagtagaatgatcccatactttattgttcaacttgtagcacttttgaagggaagtggaagtgctatatttctaagggtatttctctaggctttcggaataaacctacaatgctatggactcactgacacgccactgctctacctaaggagttctgtgtctgaagataagaattgcctttttaggtcagtgtcttagagactatccatatctgttgaagtcagagagattggacataccgggtattagagggacctgatgaactcggtgatccaaagacagagtaacaggagaaaagacacacaaatgcctttaaggttttaccggacatgggagttctcataaacgaagtgtgaaaactaattttgctgacagccatgcagaagttttattggaggagaaagaataaaatgacaattttgggagggtagtgggaggtgtcttgttatgtagttcaggctggtcttgagctcatgagcctcttgcctcagacactctagttctttacaggcaggaacctcactgaaaagaaacttaattgggatatttgtttgtttgtttgttattaggatacagagatataggaatcctaaattgaagccacattttataggaatatcatactcaaaaatatacatacatacatacatacatacatacatacatacatacataatctgggattgttctaggaggcagtcctttgaaattgttaatcaaagagtctttttgttgttgttgttgttttatttttttgttttgtgagacagggtttttctgtgtagctttggagcctatcctggcactcgctctggagaccaggctggtctcgaactcacagagatctgactgcctctgcctcctgagtgctgggattaaaggcgtgcaccaccaacgcccggtaagtcttttaatctattactgacaaccataatacaatgttgaataaatgtttcattgttagtacagcatagtgttatattgcttgaactctagcctatttatttacttctgttttcttgagcggatttaaaatttgtcttgagtcaaagtcttttcttttttcttttttctgtttgacaaagcagctcacagcaggcctcctatcctagttcccttattgtttggtataacagatatgagtcaccacacctggctgagtggaaatcatttgcttgcaatatggaacctggaacttccaggtggctcagtgggtaaaggtgctgtacgaaactgtggacctgaatgggatgcacatggccaatataaaggtggaggatgagaactgactccacaaagttgtcttctgacttccaccccaggccacacacacacaaataataaatacattttagaaacttaataacctttgagaagtgaagtattccccgtatgcatatgaacacatgtctgcatatgttagctgtttctggattcctgtgtgttcacatggatgaagacttatgacataataaaggtgaaaaaaagttatcgtatgcccaagtactttttattgaattttatttttgcttagcagatattttaagcttaagaataaactttcattttaaaaccgccatctcctgttaatttctgtcttggtgttacctattatttttgtaggattatctttcaactgtatggaattttgttcttctatgcctcatctttcagctttctgtaaacatttaaatcttaccttcttttccttaatttcagagggagttcaagaactttctactgtatgctaaatttcagtttttaagacagttcactcattagcctgctgtcctgatgctgatcagcttgtttgcacatcttacctgtgtctggtggagaaacccatcctttgcacttggatgcaatcatgtaataccgacattctaaagcactgttcctggcagtaaatttattatttttcagaaagacatttgctctgaattctcacggcgatcactctcctttgatctgctctatctttttttatacaccttgttcagtcttgcagggcctagctaagctttgtcagaaatggaaactagagatgggctgtctccaacatggtgtgtggaagcattgtttgaaatgtttatgcccagatgaacggtaaagagtagttcatggtttcattttgctagttcacaggccctcaacctttggggcttagataccacagagagctaggataggaattggaaaaccaattcagagacagtaacacatgggaacttagtccagaatttctgtttttacatttggcataagtttaggatttttctgggggcagaacccctgccgttacctggcagagccacactcttgctctcgctctttaagatctgatgtcatcattgtccttattcctcaccaaatgttgccttttaaccaataggtgtgccaacacacaggccccaggcttgatgtaggctgcaatgtgataagcactgcaggtgtcactgggggagggggaaggcttctggtttctccttcttggtcccatctcttcccatgattccccatctcctgcgagtctctccttttctttttttctccatttatttatttaaattagaaacaagattgttttacatgtcaatcccagttcccttttcctcccctcctcccctgtcccccactaacaccctacctatcccaaaccatttctgctccccagggagagtggagccgtccatgggggtcttcagagtctgtcatatccgttgtgatagggcctaggccctcccacgtgtgtctaggctgagagagtatccctctttctgaaatgggctcccaaagtcaattcctatgcccgggataaatactgacctactacaagaggccccatagatttctgaggcctcctcactgacacccacattcatggggtctggttcagtcccatgctggtttgccaactattagtctggggtccatgagctcccccttgttcaggtcagctgtttctgtgggtttcaccagcctggtcttgacccctttgctcatcactcctccctctctgcaactggattccagttcagttcagtgtttagctgtgggtgtctgcttctacttccaccagctgctggatgaaggctctaggatggcatataagttagtcatcaatctctttatcaagggaaggcatttgaagtagcctctcctctgttgcttagatggttagttggtgtcatccttgtagatctccagacatttccctagtgcctgatttctctttaaacctatactaactccctctctgatggtatctggagcatagggaggggggaggggagcagaaaggttgtgtgaagtctcgcctttcctttagaattatcagctctctgagtcaggctacaagtaagcaccagttagataaaagcaaaaagcaaagagtgacagagaagtttaggggggccacaagtcctgagcctgggaatttgcttcggtgttggcaggttttactctaggacatttccctgcatctcctcaggtgtgtgatcttagcatctctgaggttgaaatctgcaacactgcaaagcatctgaagtgactggactaccgctgggccctggatctcagtttcatgagtctcagaacaaagcctgaaaaggaagtgctaacgtgcctttctagaattttttgagcacctattttatgcaaattgctctgtatgactgtgctgctgcgtaggatagaaaagagtacaagggaggaatgaactacctaattaggcagaaaaactttgacaaaaatagttaacatttatccagtgctcagcacaccctaggcacttcctttagcattttgtgcgcattagctggaatgatctttacaataaccctaggattgggaaactattattttcattcttctatcagtggggaaacagaggcttacagaaggttggggagcttgtcagcgccacacaaggagtctcagtggcagggccaaaaccaatgaacaaggtttatcattagctgcattttaaataagttccatagcctcccctaggaggagtggataatttgtctttggtggggccatgagaggattaagtctccttgagctgtgtgtgtgtgtgtgtgtgtgtgtgtgtgtgtgtgtggagggttggcacatagaggaggctggaggttggacctccgagtgctgtgagttcagaaggggaatacatcacaggcaaggttgctggggctagcagctgggctaccaagttagaggcagtatagctagtttcattggaacttgactattctccaccctgttatatccaggttgccacctggtccccgctgctgctgcagcatctttaagcatctgtttcttccttctccccagcttgctatttacagccagcgttgatgaagactctactcacctgtgtttgtagaaagactgagagctcccttgtctgcttttaaaccgtttgcccatgacagcatatgaataacaagatggggaacatctctgatgtaacttctgaggccctgtgccatttcagcatcattttgttgcatttccctttctctccaggatagtaatgattgcctactggatctgatcttttccaagaaacataaatgggtcacttactagctttagggataatttatccaagtggatttgcaaacattttgcacagacataatgtaaacatatcataaaaatcatggcataaacacagcagtcatcggcaagggaacttcagagaaaaaggctgattcaacatcagtttactttttgtgctggtattggaatttaatatgatgtcatttttatgactggaaaatttaataagttattaactcttcaagttcttttagtaacattaggcagagaaaaatagaacagtggcctgcacctaaataatgtgctatttgagatgaatttacaacaatatagacataattgctaaataaaacaagaatgaatgatgcctctctgagggtgatatacagaatacagtattcatgaactcagattctcaagcaagagcctgatttcaaagccccagtctgaaggtgtctacatgtgcctaggtaagtaactttcaacttcagttttttcatctgttgcatgggaataggaatccttcacaaggttcttatgattattgaacaactatatacacagcataatatggaatcatctgtgttgtttctaatagagtatgttttcattacatctgaagaaggaaattaataacagagtcactgaatttataaccagcatggaagttttaacagcttaatactgggagcatatatattattacgtacaagattctattagtgaaactttttttttcccaaaataggcaaaagaacacctctgaaatttgcatgggtttcattgaggaatggtttatgtggcgtatattttgggtcaacttctggccacatgactgcacagatattaatgtacttaattgtgtaattaaatggaggagttagagggtcttatgtccattttcacatgagaatcccagcacacagaggatgaagtaattactccaagccatggtgctcatcagtggctgaagggggcttagacggaagtttgtgggcatcttggtcagtgttggttgaccttgggctgtctttcttgccttgtatttgagtaatgggaatgtgtagttgaatcttttactaggacactagctttgttagaattctttagaacagtggttctcaacctgtggaacacgacctctttaggggttgaacaatcctttagtaggggttacctaagatcattggaaaatacagatatttacattacaatgcataacagcagaaaattacaattatgaagaagcaacaaaaataattttatggttgggggtcaccacaacatgaggaaataaagggtctcagcattaggaaggttgagaactacttctttagacaaagaatcagtaaactgcatatttgaagagaagatttgctgaggtttggtttcaagaatccagaggctgaaaagttccccaggaggttacctgcaagcgaaagacccagacaacaggtagaatggctcagtccagcaatctagaaaacttagaatatgtatgtcaaatagccttccatcctaggcccaagcccacccctctctcagggctgcctattggtcctagagtccaaagggtgaaggacagggagtgtgaggtttaggacatcagcaagagataacacaagcataaaaaggagaaccagggagagattttccctttactcactgtctttttccatccaggtcctcacccattgggtgacactcttaagactgaaagtgggcttgcctcatcacacactcagaggtaatagttttcaagctttctaggcatacgtgaattgggtcaagctgacatctgaaattaatctctcacttcataggcttgaccacagaaaagtaaaaggaatagataacaccttactgagttgtatgctaacccagcaactactggattttacacccaaggataatatcagtctacatcatcaaggaggccccaggtatgaaggccaagtgagaaggcaatagattttaatttttctaaaatgtttaatgtttgtcttttcacatttctcagtaaacaatggattcctgaagttaggaagctggatgtgccttcacactgttccttatataggaaattacataggttttgccttggcatcttgggggagaattcaactctatgggtctaagtgttgtgtttccaagctaccagaggaagctcccagcttctggattgcagggccttggaggttttcctgttaatttccttcgtctaacaatgatgatgacaatgacgacaacgacaacagcaacaaaaagataaggttcacaaggggttagcagcttgcccatagccagtgcttatcttgacatatgtgaaaagatttttagaaagatttaatttttacatgactcagaggtgtcttttcattactccttggacatctaggtgagcttttactcttctgcttgcagacaggtaagacagagcacatgagcaaaagtgactgactgctaacctgctgcactatccctggaatagagagcacactctgtccctcgtttctttgtcaccttaacattaaagtcaccatccagctaagcgctatgaaactgatgactaagacaatccattctttcaggattaaggtttgagccacaggcatgggctgaagcctatcagcctgaaatattaaaaaaaagtcctttgcttttgataacttaattagcaaatcattaaatagagttcaacattgtggatgccagtcatacctagggggctgttggagaggctatctcatgtttcatgtacctttgaggaaaactatatattatacctgactcctgtctaaggtgagcttactgtgcctgcttgcttactgatacctcccctgactccaaggaggactaaagtggcatcaacacgcttgccttgacagagctgtttctctgagcaatagaagctgtaatagtaattgatgagtatttgctgcgggaaggggctcaccataccttggtgtgcagtccgctggtctgatactttgccactgtccatgtatgtttggacataagagccccaggagctgaacatttcaaaggtcaaaatggaatagagaatggcaacacagattcaaactcagagctgccagggacttcctaatacacagctaaaaattcttagttctctgaaaacctctgaagaggtttactgtttatcacttttcttgttgacgttcagattcgtttcaaaagagggaatcaggaaggagacttttgctgtctctcacttactcctactgccccctgagggcctagcccttagactgtcctcagaaggctggcaacatgtccccagtttgcccacctgcgtcctcatttcttcctcttatatctttgataattcatttcctcacagatgttttgtatttaaagcaatgtgtgcttgcagttctttcccagaggaaagtttctgctagatgtaggcttttgaaggcatttgagtacagttgcattgactgtccaacagtagaagtttctgcctagtgcacctttgttgaagaaaggttttaagattttcctggacttcttgctcagtcatcatcagagaaacttccttctgtagcagatgggaacaaatacagagaatccccagcagacattatacaaagagtgagagcccttggaacaatcagccctaaaagggatgtctctatgaaagcccttctctcagaagaggagaaagaaagagtgtaagagctagagggatagaggacactaggagaacaaggccctctaaacatggtgaaagctcatatgaactcataaagactgaggcagcatgcacaggacccttgcatatatattatgactatcggcttagtgtttttatgggacccctgagtgtgccaacaagtgggtatctgtttcttgtgtcttttcttgggctcttttccttttgtttgatttgtccaattaaatgtgttagtttctgttttatcatattatactattatctcatattattattccttagaagtctgtttgtattctaatgaaaaccagaaaaagagtggatcaaaatgggaggagaggtggtaaggagttgggaggagtagaaagagggggaagaataatcaggagatattatgtgggagaaaaactattttcaataaaaggcaaaaatattttcatgcactaaaccatgcagtatgatgagattacctacctgcctacctttcctttattggggttgcttagtctcataatcattcatacttttggacagatggaagttcatggacagatggaaggcattgctaagtgttctgtaggtgtgtgtgtgtgtgtgtgtgtgtgtgtgtgtgtgtgtgtgtgtgtgtgttggggggttaactctgattgagacctgccattgtatacaaaagttaagatcaaataagctgtaactcatctgttaggaatggtttccatttagactgtctgtctgcagcttttaaagcctgtatctttccagaaatgtaagtgctagaaggtaaacaagtttgttcttggttattaagagacttccttgacttcctattcccacttctctctaaacaatatccctactttataaaatatgtacaatgtagtgggaaaggccatagcccttagggcaggatgcccagataggagactgtctctactgatgacacaggcttgaagaaatagcatttctatgaatcttaatttccatctttgtataatgggactccttcataggacaacatacacttctttagcattctcgaaatagtctttgatttccactgtggttcccagagggaaagttgtcagagtatagcagaatgaatacattgtcttccccaaccttcacgcaagcctccccggggatggaagaacagcttagcctctggtgattgcagggatggaattgaactgactttgcaccaggtcttggatcatttctatctggaaggggtgctctactctcattggccccactttagttttcttccatcgcaccatgactcaagaatgagggaggggaaaaccttctgagggtccctggggagcccacacttctactcagttgaaaccctaacattttggtctaattgcctcagtttttctcaatgtcaattttcataatttcttgctttcttttaaataacatttaggtttttgtttgtttatattttgtttgttttcttttgtgtctgtggttttgacacagcttagcaaaggctgcacaatatataaaggaggaaaaaaacacagggatctttccagtctggaaaaaatgaggaagatccacagcttacaatgtgtttgtactggaaatatcaggaagaaacctaccaatggaatacttccatattctcccctgagttctccaaaaactcagggtcttgagcatgctgggaaaatattctcccactgagccacatatttagcaccaattcactctctttccccctcctcctactctcccccctcttttttgtaagtagaatgtaagaagcagtgtggtattgaacaaatatcagagacaggcagctcagtgctttttcattctggtgtaatcgaccagctgctgaagagttagtgtggaacttcagggacctcaaggagagtgaagatccctacttgcttatcatggtcatctgatgagcaagaaggatcattgtgcaggcgggaccttgaacttgtgacttctaagagaattctggagttccaggccaaagcagccatgtagaaaaaaagaggacaaaactcatgggacactcattctcttccttcttacttactctttccagagaatgaagtgggaatggcatgaagtcaggagactggtaatgaaccctgaaaatgtctgtcatcaatcagcaaacaccccccaccccacccatgacttggtgcatggatgcccctgtgactaatttgccgcatctttttgtagtaacaagggatttttaaaggtgtttatcccatccacagctttttaaagcagcgagttcatttaaataattacctagtcatttagttaatgcattcttttttaaacttgactaactacagcgtatgcggttttgatggaaaaagagccccctttatgtaatagcactgttttttcccccacaaaataaatgcaacacaattattttactgcagagaaattagctcatttgcaaatgccacctcagaacacaagaagaatggcatttattgaagcactaataacggcaccatgttagaataattttatgctgacgggtccacaatcactcaacattttaagagctgtcatcacaccagcatgagctgcatgcaaaagtacaaatttatgctgtgacatcatggcactgagtgtgattggaataaaatcactggcttctctttggcttggcgtttgctggcattgctgagcccttccctgcccacccagagcagattcttggtactaaccagcagtcacaccctctgtgaatgtaggctggaccaggctcatgcaggtgggcccttcaagagcttctggaggatgcttttcagtgggtattaatgacctgtgctgtgactgagcagaaggctatggagctgcaagaatcacaaatcagccaaagacactctttagatatggataattaagcagcagtcactatacaatggctgaggaccttacattaattctagcaagttaataaattccagtcatggcctctggttaagtgctgagcttgagggaagaggatgcctgcatgagaaccaggacatccacatcgatcgggtggactttctgtaatggttttactcttttgggggtgggtgggggaggggtgcatttctagggaaacaacacctgacaagaggcactgcagtgatcatggagaaagggcacaaatgcccctgtcatatttagacatggtgcatggcttgaaatctcacagttcttgccactttgaagataatcagatgtgctctgccctgaggaaggaggtgttgatgtgcatcttttcaaatccgggctgaactctgtaattgggaactgtgtttgggcacacaggtgtggctgtctgtcaaagatttgaggggaggtgcgtgggcacatttctgtgaaacacgtctcagtgttcccctccatggtgttgaaagtgtggaatgcaagagtctgtctgcagcccccatgcctgctgagaggctgtcttactaagcttgatgagatagttaacttggatgtagggaggaaatataattaggggccagataattggtaaacataacacatttgtgttaagggatgacagagtatggaggctgtttgcattggaggatgcagatcctgataaagggctctcggtgatgtccaaatcctaatgatcagctcttgtgaatatgttaacttatatggcaagtgggaccttgccaatgtaattaggagtcctgaaatgggcagattatctgagttttccatatgggtctaatatgatataagggttcttgtaacaaaagaggacaggaagaagcagtcagaagctgaggagacaagcagaggatgaagtgatgtggcagctggctttggagatggacggggctctggaccacggaattggggcagtgcctaggatctggatgtggtcaggaaacagacatctgctcagagcatgcaaaggaagggagcctttcacagatactgatttgagcttcaggagccatctcagacttttgggctccagaattacaaaataacaactatgtccgattttatgacacaaatgtgtggtaatttgttgaaacagcaatagaaaaccaatgtaatcgtcttttaaaaattaattagcatgttaaatgaactgaactaatttttggtgattagtttacaaactgattagttttttgtttctatagtaacaataccaaaaatcctatcgttcccatgctgattcctgaaatcaaaggaatccttttcatcaggagacagatgtttagaagtagacaaacacagacctcagtgagagtgaagagatgaagttgtgggctgtagaccaggagtgcaaaatgctccgtgggttcagctctgtttgtggtgggttccggctctttgtttgtggttggccctcctgatggtgaaccttatataacagacagtaataaattgtagtttctttactgatatttaccgaagtgcttgtggcaatttaagaacatggcttcagagccttaggcatgccattaagaggtccttttggtgctagtgggccagattggtcttgttcgagccaatagagcatggcaagaaggctctgttgtcttccaagagcaggccattccctgcggaagaaggttcacaactaatcaaaatgcagaaccgtgatgccctgttcccaatgacacatctgcaaaacgctcccaaactaaagcacagagaacatttcagaagaagggcagaaagattgtaagagccagtggatcaggggttttctgtgagattgtgtctcctagtaaggtcagacccagtaatgtcagtcatgttgtgaacgtgcctgttgaacaaggacaacaatagtaggcatgagccaaagtgaactggaaaagcccataaggccccaatcttacccagagaactacaggcaactaaggaatgctgagagtgggagaaaatcttcctcagggaagaacacattaattggttatctcatatctcacatatgcatgttgcagcaattaatgaaaaaatagaggccatgaatttgaaagagaaggagaggtatatgagagggtttggagagaggaaaggagagagaaaaaatgatgtaattatattataattgcaaaagaaagagagaagggaaggaaagaaggaagaaagaaagaaaggatgcaaggaaggaaggaagaaaggaaggaaggaaggaaggaaggaaggaaggaaggaaggaaggaaggaagaagtggggcagtggtggcacacacctttaatcccagcactcgggaagcagaggcaggcagatctctgtgagttcaaggccagtctggtctattgagccggttccagtacagcttccaaagctacagagaaaccctgtcacaaaaaccaaaacaaaacaaaagcaaaaacaaaaaaggaagaaaggagaaaagaaagtggttgcagagccttaggcatgccatcaagaggcacttttggtgcaagtgggcagtcagtcatgaactaactggccaaggtatccagagatctgttgtcttctaaaagcaggccagtgcctcaggctactgggttcaaagggatttcccctctggctcttacaggcaactaaacctggatgaactccaagtagatactccttcagaatgacctgtctcagaccagatttagtctgccttagtcatgttagtgaagaagcctctttctgatttcaagctctttcagtcacccaaagcattgaagtcttgtcaggccaggctacagaaatcagagtgcaataattgtccctgacttcctacttccagccctggctcagagaatccatgagcattgcaagatgattgtttatgccaccaaatgtgggtgacttgttacattggaacaaaatattgcctcaagggatcatcaactattgtcagacacaacacaagacagtagagtgtgacactgagaccatagccactaacatcactgagtggagaagacaaactcgcctgtcatgtgctacaatcacattctctttgtatgaaataagggctttgacatattttattattataaattattagacaaacttagttaacacaacttcttccttctcagttttcttctgaattagggaaggagttgtggttttaaaatcattggcgagaatgccttcaggaatttctgtctctgtttttgtctcactgaaagataattattgaaaaatacacgtttgaatgggaaaactaacagtagtataaggaaacaacatatgtttgtttttaatgttattaacaaatcctgtgcttcctatatctcttgcagtaacttccttatttgtttgttttattttcctctttgagacttgaaatatgccatcatttgtttgctgatgtgcagggcactgcagctgaatcatatagataggatctggtatccgtgttacatagaacctaatcttattcttccattttgggtgtcttggcattgtcttcaaggcagctccttgcaggatttctggtgggaacagcaatgggacatttacccagacttcaaagtttggcagctatgaggtggaccctgaaattgctgtagggtgttttatgaactctcctgcatgtcagtttaacttaaacacatatattcaccattttttgaagtaagtgcaaatgtatgcttgaacattcatttagaaataaaatcatttcatcacaattaatttttcaaggctaaggataaagtaacccaaagaaatcaatattgcacattccatacataggagaagtacccaatgtaagttttggtaagtttacggtatttcaaaaaatgaacaggctgactgcctttctctgctgaatgcctgtatggaataatgcagtgggtgaggacatgaggtcaaagttcaactgtagttgtcagatctccaagaacaccatttacccttctttgcctcagattcatttgtgaagttagaaattgtgaaaagctgtcaacttctgacaccaccatgctctgaatgaggtgggaagtagatcctaagtgaggtatttagggatggtttgatttttttaagaagtgtgtttccttctggtggccattgcagctgtccagtgcctgtgttgtggtagattctcaaccatcccagttttccatgtttctactgctgcctctgaaaccaacttttccttagtcatcttttgctccttgtcaggtggtgacagagtctttaaaataatcttttctacaaaataaagttctttctgtgtctatccaagtaacttgtaagccccaggtttgtggatgagaccgtatttgtaagacttagtaaggttcacctctcatatctgaagtttatataatctagagacttgctttgggaaaaagaatatgtcaggcaggtgaggtgggtaagagctcaaagccaattctgaggacccaaaggtttttctggactaatatggtagcagagagaacctattcctacaagttatcctttgacctctacatgctgtagtagcatgcaaccctataaaaatatataaatgtagaatagtaatagcagtgatataaaactctagatagaggtcagtaagatgatgaaaatttcattagtgtgagaaaagatccaaaacaaaccatcaaaagataagatatatggatcttctgatgccattttaaataactgcatagaaatgacttggtagaaatgttttcttctacagcctgtttgtcctaccttctagaatgttctctaactctctgccaatatcagcaatctcaggtttgagactaaacctccctaagcttatgtccagtgagtgaataaatttgcccagcaggtaaaggtaacaactgacacccacaggcacattcattatgcagagccctgctgtaaataggtccaatgcttatcccctttacagtcattcatgatccaggagcaggagccagggaagagaaagcaaagcttcctgggtatgatgctacatggatgaaatatatagtaattattttaaatgtctagaattactcagaacatagtcatagatgaggaaaattccataaatccttaaatatgaatgtgtggcaatgctctggacttaggagagagagagagagagagagagagagagagagagagagagagagagagagagagagagagagagattggggtcagagagatggctcagagattaagagcacttgctgttcttgcccagaaactggattggtttccagcatccacacgatagctcacaactgcctttaactccagtttcaggtctcggataccctcttctggcctttcccagcactaggcccacacttgtagatatatacacagcaaaaaccctcataaacattaggaaaatagagaaatattaatgacacaaataatgacattgttacaagtagtacattctgactcacaagtaagtatcctcctgaaacttcttttaaaaataagacttcacaccttagggtgggtgtgtattcagcagggaaagagcactttctagaatgctcaaagcttaggtttccaccctcagcatgggtaggaattccagccaattctattttgttgaattgaaattggtatcttctcttgttttcttgttaactgagatgaagagtagcaagaaatgctttcaaggatatttgaacatctttaagaggtactaagtccttccatgaggtttcaggacagattgctaaggtgttaaatgtattggttaaaataggtatgccaaattggtagaaatctagtcatgtaacttaaatgtcaagacttaaagtatttctcagcatttgctgaaaggcaaactaagtaaggaataggaatcatttgtcatgactacatttcagccctggagtcaaggttcagaatgaagccccaagacataataaaagcacagatagatctacagagtggcctcaagtgtggaatgtcaactctttaatggagcaagcagggaaagggctcacaaataacattgtcatcacagatgtttctttagtaacttctgcacaagtcaaattcatctacattattatttattttaactgttcctttgcattttgtctttacttaaacctttaaaagcaatttatcatctttgatgcatcagtcagtgcctcagcatgaaacagaagccattcagatgtttaaagaaggacatttagaagataagaatgctttcagagatgtagggatgtcactggaggaagtggtgagctggagccatggttctatgctaagtcctacagcagctttgaggtgatctctcagataagtctattctggtgaagctagattcttgacttcaccacaaaaagaatttcaggaaaagtccacgtgaagcagcattaaagtttattaggacctagaaattgaacatagatttaaacaggggttaacagaaagagatattcaagaaagaatggcacaaccgagtaggattgtggcttctcaagggaggatgtttctccactgttgtcttacgagtggatagatgtttttggtagctacatggatatgtatactaggtcactaagaaccccctgccccctccctttgatggtatggctcaagaagtgctttgggtaggattgtgttctgatacgatgaaaccatggatcagaagggatgcacaagggtgtaagttgtacgttttagtgtaaatgaagtttcttgtaagttttctagaaaactgcagatttatagcagggaaaggagaaaacccataagcattatttgttgctatttgaatatttattgcttatttgaaatctctctataaaagaatattgtctcacctttcatagcaaacactactaactatgcggagggtctaagcttttggtggtgagagcctgcagccagactccagggtgaggtgttcctttccctccccacatccgagtaactttccttgcctttctgtactgactcaataagtccttaaaatttagcatcacatgatcaatgttggagtgctcagagagaagcagctgtgaaaattcctcagtgattaaaaggcagagggtgcaaagagtatttccagactctcatgacacctgtcaacatgaaggatgaacaaagtaaacaatctctgccaattactctgcatgtaaatctgaatgcatatttaagaaagtgtgtgtttacagcttgagggtaaatacaaactttgacagagatgaaatttaagcgtaataggaacaatctgaaaaatattgtagaatttcaactcacaacagctaggtcctctgttgggacataggtatcaatccatataacctaagatgagttttcattagatttatagagaatgtggcttgacttttcatgcatacccactgtttgccagctgtgtgggaggcttgtgaactcacttcagtcaactcactcatgggaatttccattgttttcttagatcaataactgtacataatatagctgtttcttctaggcctgccatgactgtctgccatgacagagcagagattccatataggatttcatataaagcaatataatgatagtctatggcaatggcaatgggactgttatcattttcttctagaagaaaagaagggataatcacctgaccctaaacctgaaatttcagctaccactccaggaggcagcctagctatttctaaccgtggttgctccaatatacaggagatggaaacagacttcagttgcttttaagtcatctgtgctcctgtaaatgacccctataagtttattgggtttccaaactggacttggatggatcctttctttgacaacacacacacacacacacacacacacacacacacacacacacacacacacacacacacgctcacatgtctttgaaatgttttaaaattttctttgcgaatatttctttaaatttttcctattagcatgcttgtaatattttctagtttatgatgtgcatggcatggatatatcaaagttgatttagccagtcttatccttagcaccttatcctactattaaaagctaccataaggaatattttgctatgtatttaatatatgtgtgtctaagcataccagtgaaagcatttcttgcaaatcttcaagtctaaatgacaggtcaaagatcacacacttctttaattacaatgtgcaattggtgaagtaccttatgaaaaggttatgttaatttatgttccagccacccttcatgaagagttcctgttttctgaaactctctccaacattaaagtattcacagccatttacctcttcaccagatgataaataaaaatgatagctccttgataatgtgatttgcatttttaaagagaggttgaaattctcttcctgagcttattggccatcgactgtgacaaggtgctaatcgctaattgaagataggtattctcatctatttcctgtcttataccagggatgccctcagcacacactgtgtcttaggtactgtggagggaaaacatgcttcctcatgacactttactgccatctaccagaaggaactgtcattatgaataaataaatctctgaaaactatgggattaacattgccctgtaaagctgtgcagtgctcaacccatacatctgtaaagccagacctgctaattctcagccttagtttctgagtctcagccaagatagtggctgtggcctctctagctttcattcattgtactctggtctgctgatgcaacttcatagttccactgtcctatttcctagccccttcccctgtgttgtcttggtcctctctttttggttcattttatctgtcgccgaactcgactctttcaatgagcattttctataaagcctcagatgccaagtattccaccagcattcctaagcatccaggagaccagaagaccaggagactttctttgagtactgggcatttcattatttactgttttggtagactcttgtaatccctgtaggctgtgctgtgtgtgtgtgtgtgtgtgtgtgtgtgtgtgtgtgtgtgtgtgtgtgtgtaaaatctactgtgcttatgagagatgagagtcagggcatttttcttagctcttatatgtgagatttatttatagattcaattactaaatgaattagctactaattaagacttctacaactattacttaactagtagtgatgtcagagcattggataaagggtagagattaatgaagaaaaggctaacaaatctaaaccaggtttagggaaaatccgtggctgtgtttgcaataagggaggacagtcggtttacttaagcagaaaaataatagagttgtttaataccactgggcaaagtctacaattcaccccgcaagaggcttgcagcaatttgagccttttagctttagaataaactgaggaggctcacagaaggcctttcctcatgatggaggtccctgttgacctctttttaaaagtgtacaaagttcatggttccccagatccactgagcaaatgtcacaagcctttactagaacacagaacaatggcaagtcagtctttggagtctgtgaaaacactctagttgtaagtgtgtacactagctcagtggggcttcggcggaagtctgaggagcatattatatgaagtagtatgtacgtgaatttgaaaatcacaataacatttctttctaaaagggagaagttgaagtactagagagtgcagggcaaccaactcatagctacaaaaggtagcccgccctttgcccagagggatgcctttccaaaacaatcatcaccgtgaatttgagagacaagggtctctggcattagcataagaactcatcaggcagaccactttatccaaagattatgtaaagtttccttcctttttgaccctgagtgaccttgatgtaagtttcttttgtaaacctggcattttttttttttttctagttgctacttcattgactcagagaatgtgaggatggcctggatgggatgtctctgctgggcaggcaacagtcctgtgcccatccagaaagatttacagtgtagtgcattctttgagtagagctttgacaggataatttattatgctaggattgtaaaaacaattttaactaataaactatgaggaagttgcctttatcttgaaagtaccctgtcagctaacccaagagtagcccaagcctggtgctatgggctattctttggtttgtttgttgttgtttttgttttttcaagacaaggtttctctgtgaagctttgactgtcccagaacttgctctgtagatcatggtggccttgaactcacagagctctgtctgcttctgcctctctagtgctgggctgctgggctgctgggctattctttttttcttttcttttcttttcttttcttttcttttctttctttctttatttatttttggttttttgagacagagtttggtacaagtgggactcaatagccagttcagggcagaagaaggcttcctttatagctgtttctattgtgtgcttgggctagagggatctgtccactcctgaccccaaacatctgggcttcagtgctgacagcttcagccaatccaatgctcctggcatgtgtcaccaagtccttggcaccaacagcagttggggcagaactctaggcctctttggtagctctcggcatgcagtggcctccccagttcatgttacccaagtcacacacacacaattctgtccctgtatttttctccatctagagaaatgtctctgaagatcacagggtgttttctgtgacacatgtttctttccttgaccaagtattctgcatccacccacaacattgtgactgagatctttgcttttcttagattggaaatcctaaataaacaactggtgtttccctatccctcagcctggatggtggggattttgatctgctggcccctgactatggttacactgtcccctgttactgcatgcttataggtataaggctattgtcatgcatacattctgcatttgaacccagctagctctatcagtatagagacactgtcttggcagtctcacagcctcagcaattgcgatttctcagataacaaatccagtctcagaatacttctgctgtttttcatctttcatctctttccttttctccatttctttctcttgcctttttcttgttttccacataaatattttcctttgtcttttagagcactgcaaacataacagctgggaataagtcacacaaatactcatttctcccttttcgctatcatgtatatgaaaagatttttctcatgaataaggccttgtgaacttttttgtctatgacaggtgacatgtctattgcaaggtgttccttcaaacaaattccaggctttcaggtgagtgaggttttctattttgtataaagcagttggggacggtgaaatctagaatctgttgagctagaattccaagcctaaagtcatatcatgtcaggtcctcaacagaagttttagactctggatgcctgtgattaaccgtgcatctcacctcttctttctgttgtgtttgtgtaattaacctcatgcttgttctggattgactgagctaagacaacagttcccctcactgcagagcaagtatcactgctcaagtcaacattcttatggtgctctttgtcaatccgtgattaatatcatttttttctataaatcctccctgttttcaccaaccccatctcacatattctgaaaatattcttttacctttctaatccatatgcttctgttggctctaaatctttcgggctttgtagaaactagtcattcattggtcaaagccttgatgaaaattctgtccagaatttcaaattttgctttaaacgtctttgttctatgctttcatgagatttcaggtcaatatctctttctctagaggaatacagtctagatttgcaatgtctttcaaaggcccaagtgtgaaaagttggcctgttacctgtggggaggctgtgcagcctttgagaggacaggactagttggaggaagttaggtgaccatagaaaggccattgctatccttgtcccttcattttcttcttaactatcctgggccaccagaaggtgaggagctgtttctgtccttgagatgccacctcattacaggcacaaaagcaaaaagccaatcagcccaaaattatgaactgaaataaaccctttgatataaatcgatttatctcaggtatttgttatagcacagaaaactaacagccacatatatcctgctttcctgcaaacactttatgtgcctataaactcactattacgttacaaagaccttttcaattgtaacaattacatgtctgctttccattggatttcactgtttttggatctcattggaccaaagatccttgttttactattaaatgactgcacttttatattcatgataaccagatagaaagagcagccaggatataatacaggcgtcagaactgtctaaaacagtgccaccagctggggatcgagtgttcaaacatatgtgcctatggggaacatttcacattcaaaccacaacacttttctttttgttcctttcttttttctaccttcttccttttaactttttatttgttccttttctctttcttttttctttgctctttcactctgttctttcatttttctggcattcacaggttgctgaaggagaatagcttatggaatggtgtatcttggagtgaggaaagatgtttagtaatgacccagacagatcctcggcctttgttcatataaacagacatgcagcagacatgcacctcttccattttggtttctgcataattcctttcctatagggaagtagtagcttgggttttcattcagtcaacttcctatactcaaatctccacagcaaggatactgggcctatagtaaggcaaatgccatgtataaggtaggttttgagttcttgtcataccccagtactgccccctttcatagtaacactggagtgatccaattctcatctccagggatagagactggactcaagtctggtcatgactaaaccaaagtcatgtggcataatcaaagctggtgatactctactgtgaggcttgtattgaaaggaaaattaatctttcccttccttccctcctttgtaaaacttgaatgcagaagatggagcgtagaaatattgagcctgtcttgtgaaggagcctcatgaggatggagtcatggaacaaggcaatggagtcagcacagagaatgactgccttctaagaagttccttaatcctgggattcctaggttttaaggtacatagtaaatttctctctgtctctgtctgtctttctgtttctctctgcctgtccttgcctttattttattttaatgttggtttgacaatatgtctgtttatttgtaacttgaagaatttggtttataaatacaaggttgctaaggccccatagatagcaacagctgctcttggacacacacttgagtgacatagagaaaagacaggtctatacttcttatacagtatattagtgtataacttctagtgtccatatttttgtgtaatggttcaagtattgggctatttattcatagtgcccttgacaaggttcaaacttagagatatttggaaatgaaaaactcataattattcctttcaaatcaacttcttgctcagcttttctgttgtggaggtgagattgttgaagccagaagagaagatataaaattcatccagctctttggcattttgctcctggactttttgatatacttccataaaaatgagagctccttgtttccatctttttactgaaactttgatatgctgttgagctgcaggggtctgttggttggttggtttttttttatttatcagcttaagatagacaacagcagtaaatggtgatttttaatttttccctcccattttgcacacaacttgatttgctaatggtagcaaattagtctgatgaggaggaggtaccaaccaagctgtacggttgatgctgactttctgagtttgctatgaaaaaaagcaaaagccatttccagtggctcctcatgttatccatagttgccacagtttccctgttagctttaaagttttatctagttaaggcttttctggtatttagaggattgcacattggcagtaggatgtgttgttcccaagtaaggataacaggcatttacttaatcatgatgtggcctttcatatttcagccacaaaaaacttgattttgctgttttattgagggacattcatttttttccccttgtgaatggtatgaatgtatagggaatggttgtcagaatataaatttattagtgtacggtgagaaattcaatggttaagaagtctgttaatctccaccaatagataactctttgccttatagcagataaggagctatggaaatcagaacactataaaattatgtcaataatattttcatagggtgtatagacttggatggagatgggttagtccatttcagagtggagtgaaatgctcacttcatccaaagataactttcctcaagtacttttaaccatcaccaggcttcttctagcattgtaagtagtggtggacacatactgatgtaatcttatttgttttcctacaaagaaaattgactgcaagttttcagactacattaggagattcagacaagcaggacttactgtggtcagcaagtctgactctgctgaatgattttgagtagccctgctgattaattcagaaatcaatggagtttctaccgaacttagtgggtacagggaattgaacttgattctgtgaaaatgaaaagaccaaaataatgtgtagaaaatccggctgtatttgaatttattttcataactcagagcatttttgaagaggaaagtaattcagctatggatttctgtcctagtgcctaccaagctttttatgaaattgagaaaattttcctggtccacacgaaagttgaaggtttctgcaagaactttacatttcctagaggcttattttctccaatgcaattcttttctactctcctgctatttttaatgcagaacttttttttttccctgagatgttctctctgctccatactcacctgcatgaggagtaaagtttcttcaattgatttccactagtgctgcctgcacgaaggactcctaggcactggttcttcattgaaattctgggtgatacaaagggaagatttggagttagaggggaggagcacaggaaacagaacgtcataatgtagcactatgcagcaatgcataaaaaagagcagaacattctaccttcctgttgaaaatgtttaggaaggtaaacagtgaatttgttcttcacttagttgtccctgtgtgggctcagactccctgcttaccactctactccttcttgacatgttcctaatagctcacctctgagtcagttaggtcactgtgactctcaggaaagttgggtcttttctgttccatgtctctgtgtcaagatcaaaatcaaaatgggctgatatgacatttttccaaataaggacagctcttcagagccaagtacagtcttttgaagtaatgaatggaactcatgaaagaaagctcatattatcccatgtagtccctagccagttgctgtggaggagatagtaacatgggaaaatgtgtgacttaaatttcagaggtaagttgcttttcccacaacagtcagtactagatgcctgccttagttgcctgccttagatgtgtgccttacatacctgccttagatgcttgctttaagtgccagcctgtcttaagtgcctgtcttgggtgattgcgttaggtgcctgaattaggtgtcttatggatgccaactttaggtacccaacttagatacctgtcttagatgcttgtcttaggtacctgccttatgtatcttccttgggtgcctattttaggtgctgtcttaggtacaagctttaggtgccttctgtaaggttccttagtttcctaccataagatacctccccaggtctctaactactatgctatctgcagttagattatatgattaaaccaggataatattataaaggagtgcagaaatataattagaatattttcatttatccagtatgattatataagtattttctttctcaggaaaatttaatgttttctttgtggcaaaattttagttttaattaaggcttttctaattttctaatgtgttgttattctttatattttatctgaagaaacaattgtgcatatatatgtatcttgtatctgatcatgtcattgaccttattaatcccaagaagcgtataacatatgtcacctgttttccgcatggataacttattttttaacaacagcagaatagctgttttctaatcacctgcctctttttctctgcctcctgatttatgggaaaatatcagaaaaaatacttctagttttctgtttttaaaaatccattaaagaacaagtggacagtgaatgttgctgaatcaggtgaacaattaaattgctaattttttaatcttttccttattactacataataaatatctgggaattcctaatcctatgcttcagttcttggaataattctcagaattccctatttagtcatgataactaaatcctttatactaacaatttcattttgtaacttaattagtaagtgagtttatttttgtgctgtttctattttagccttagggtttttgagctcatgaaaaaaaaaaaaaaaaaaaaagcccaacctaccaaacaaaagccccaaccccatcctgagcagtttcctaacataagaaggaagaatgaccttttctgtttctttctccccaagtactgtgattgaactcatggtcttgagcacatttggtaaggactgcattgctaatgtccatcactaagccctggcttaactatttttaattttttttgttgttggtttatttattattattttttattttattagttcaaattaggaacaagcttgcttcacatgtcaatcccttctccctcctctcccccaccccaacatcctacctgcccctagccatcccccctccactccccaggcagggtaaggccctcaaaaggggcttcccaaagtctaccacatcatcctgggccaggcctaggcccttccccatgtgtccaggtcaagagagcatcccttcatatgggatgggctctcaaaatcccttctttttttttttaagaccttacatatttaatacagtgtgttacccctgtgcaaatggaaaaaaattaagttcaaaatttctagaacaatatggctgttaatttttgtacaatgccaactgaacgcggtaaactcggatactttttccaaagttgacagcacagctaaagtttccaaaaattcaaattatatatatatatatatatatatatatatatatatatatagaccaataatggcagtatgttatgcatcaatagcagcaacagcttttccaggttctgcagtcatttaaacaaaattgtagagacatccagcactctccattaaaaaaaaagtaaaaaaacaaaatcccagaaaaacagcacagctctgttactgttgtggtatctggcaccattttttttaaaattagcttctcaatcatcatctggaaggaaaccattctgagcaacatcattaaaaacagctctgataaagcatggtcactactatgtatcataaagcaggtccacatatgagtgagtacatatcatgtttgtctttttgtgattgggtaccttgctcagaatggtttcttcaagttccatccattttcctgcaaatttcaagattccattgtcttcacccccaacctctcacctctgagtagtactccattgtgtaaatgtaccacattttctgtatctattcttcagttgaggggcatctaggctgcttccagtttctggctattacaaataacgctgctatgaacatggttgaacagatgtccttgttatatgaatgtgcttcttttgggtatatgcctaggagtggaattgctggatcttgtggtagactgattcccattttcttgaggagtcaccatactgatttccaaagtggctgtacaagttggcactcccaccagcagtggaggagtgttcctctttctccgcatcctctccagcatagactatcattagtatttttgattttagccattctgacaggagtaagacggtatctcagagttgttttgatttgcatttccctgatgggtaaggatgctgaacactttcttatgtgtctttcagccattttagattcctctattgagaattgtctatttagttctataccccattttttaattggattgtttggtgttttcgagaatagcttcctgagttctttgtatattttggagatcagccttctgtcagatgtggggttggtgaatatcttacccagtctgtgggctgccgttttgtcttgctgactatgtccttggccttatagaagcttctcagtttcaggaggtcccacttattaattgttgatctcagtgtctgtgttactggtgttatgttcaggaagctgtctcctgtaccaattaattcaagggcatttcccactttatcttctagtaggttcagtgtggctgggtttatgttgagatctttgatccattttgacttaaattttgtgcagggcaaaaggcttgggtctatctgtagtcttctacatgtttgcatccagttatgtcagcaccatttgttgaagatgttctctttgttccagcgtatatatttggattgtttgtcaaaaatcaggtgttcgtaggggtgtgggttaatttcagggttttcaactctattccatttgtctacctgtctatttgtgtgccaataccaatctgttttcaggactgtagctctgtaatagagcttaaagttagggatggtgatgcctccagaagttcctctattgtacaggattgttttggctatcctgggtcttttgtttctccatataaagttgagaattgttctttcaaggtcagtgaagaaatgtgttgggattttgatggggattgtattgaatctgtagaatgctttgggcaagattgccatttttactatgttgatcctgcctatccaagagcatgggagatctttattttcgggtatcttctttaatttctttctttaaagactcaaaattcttacagtacaggtctttcacttttttggttagtcttaacccaaggtattttatgttgtttgtggcaattgtaaagggtgatgtttctctgatttctttctccaccaatatgtcatcggtatatagtagggctacagatttttgtgagttaatcttgtatcctgccactttgctgatggtgtttatcagctgtaggagtttcctggttgagtttttcgggtcacttatgtagactatcatatcatctgcaaatagtgagagtttgacttcttcttttccgatttgtattcccttgatctccttttgttgtcttattgctttagctagaacatcaaggacaatattgaagaggtatggagagagtggacagccttgtcttgtacctgattttagaggaattgtattgagtttctctccatttaatttgatgttggctgttggcttgctgtatattggttttattatgttgagctttgttcctgttacccctgatttctcccggacctttatcatgaagggatgttggattttgtcaaaggctttttcagcatctcgtgagatgatcatggatttttttcctcagtctgtttatatagtggattacattgatgaattttggtatgttgaaccatccttgcatccctaggatgaagcctacttgatcaggatggatgatttctctgatgtgttcttggatttgatttgccaatattttattgagaatttttgcggcaatgttcatgagggagaggcttaactaaaagtaaattttagataaacctttaataattttctttggtaatgaatcttcacttattatactttcaattgtatcattctaggtaaatcaatgtagtctttacatattaatcaaagcatgcagccaagagtgtcttaccttcagaattagaaaatactttgtgttttcttaacttgtttcttgtatccatcatacaaacacaagctgcatccattacttgcatgaatttatttacttattttagaaacattttaccatgttatctttcattccttttttaaaacttacatttgtttactctctctctctctctctctctctctctctctctctctctctctgtgtgtgtgtgtgtgtgtgcatgcacttgtatgctacagtgtacaggatgtggtcacagtacagtttgcggcagccagtcgtctccttccaccatgtggtttccagagatcaaactcatgtcattgttaggcttgctgccaagtgtctatcactgagtcatcttactcactccattcatttttttccttttgctttactttcattcttaagatttaaaaatatttaataatttcctaaatatttctagtactttatccttatatatgattaaattataaaacatcctaaatttacttacgactataactttaatagaattagatatgcaaattcatatagagctctcccattttagttttctgacaacatgtgcttcttctaataattctcttagggatccataagcctttttgaaattcatgtctcatgtacaatggaaaaaattgtatattctaacaatgcaaggttttaaatatgtattctatgtacagatatcactagctttcctaaaagtgaaagagctgtgtgatcttctaagacatatgagtgtccagttgctgttcaagattatattggtcacatcatggcttagttttaaaaatctgctttaaaaaaagtgttgtttaaattttctagcaacagttgatagccccgcattggtggatgctcttcagagataaccgtgctttccccccagatgcttacaataccttatttttatcttttaaaattaaactatgaaaataccaaaaagtagtgtttcttgactatctcttacccatataccatttgcagttttaccttgttttcttctagccttctacactacagtgaaaacttagtatgctaagagtaatgtcaaaattgacttcctcgatatattggtataaactatttaagaagtcatttcagttctgtaagactgatgttttcactcctttgtgtggaaagtaatacttacttgataaaaataaattaatatataaaagtttactcaaatgtttacagataattttttagtaacatggtcaagttctttgatttggctgctcagttgttcttaaaataattatttggagtcattttagatataaaagcatattcacctgttgatgtcttgaggtagccttctcagaattttgaaacacagactttaaatttcaccagttgctatatacaatattgttccattcactctctggattcaatgtattaaattttcaaacctctttggtgtccaacaacttgtgacaaggttttgtgatcttgacacgcttaagctagcagtgtaatgtgttctttggtatgatttaggattctgttccacatgttcacagtctccccatgatacaaatgtaacaaggagatttgatctctactgccttattttctcatatgccaagttctttcaaagctccccttttttaaatttgaagggtgtttctcatctttgatatcaaagtttcttttctgattatctttgatgctattctcttcttcactaacaattttaaatttaaatttaaacattttcctttgtgtaagtttgcttttcaggcaacactttcttacacaatattttttttcttccttataatttgtacattgcacttcaacctttctcaagaacatatttcacaaaatataatgtcctaaggaaaaaaaccgtgaacaaagtacacagaaagagataacagaaggatgtctaccttgtagcaaagagatagagaaaggaactcttcaaatgtgaggctttgcaagtcaaatgccttctcctttaaagctggaactagtaaccagttccttccattttcttttgatttctgtaggaactactttctaggagtttgctttgtaggaacttatcctacttttcgtcatttttacctctctcattttgcctctttatatgccataagtgtggtgggctttatacaacagttgaatagccctcaagttctgtgagatacctgttttcgatgcccatttctgtggttttgctcaagatcccttcttatctccccaagaggaaaggcctgtattgttctatctacttttcaaagaggttcgggcttccatccattgttgctttgttgaactgagtgaaatggtccctctacctatgtctgctcaatttcttgaggattctcataatacagtgtattgaaaatagaccaagtttcttttctgtctaggttcactcagataattgacatgactgactgcattactgcagagcactgtgacagtattctttccatgttttctgagcccaggggcttctgggtgggaaggatgtaaacaaagttctaaaagtacaaagatgactatctcaattatttcaagtctagtaagtctgttaatcagttgtggtgaaagaaagatgctccccatatgtttgagggatgggaagaactgcttccctatgatagagatgatgatgtgaaggatgacttacttgctgttattatttaggtattaacttagaggctcagcaaatactcatcctggatcatggttatgtgcatcgttgcatggccccagggacctaggcctgacttggttggtaaaagaatgaagagatgacaaacacagatagaaatacagaaaatctggggtcaagtggactgggctctctgatggagaagcctcagcagcccagatgttcagtatgtttatacagagttgagcagaacagggagtcaaagttattgtatttagtgaacaaggaggtgaggttattacatacagctaaacaaggaggtgggatttatagtgtgtagctgaatcaaggagacaggtttagctagtctgtataagaacagtccctctagggaagcagtctttagcacataacatcttagggaagaaagctatagcaggcatttactgagcacactatcagcattcatactaggacccccaaggaaggctttgtgatttctctaagaatccccttagtggaaaggctttgcagtcttcctatagattcaaggctagggtcattgacatgactatgcccatgttaagagcacatccacccaggacttcactcactcctcacattttcctttgatttcctagatgcccagtatggaacttcaagcttagtgcaggggcagttctctgcagtgcttgacaccagactgtggaggatgataagaaggaagagcataacagctgccttgcctaacaataacaaaaggactgttctagcaagttgaaagcatgaagccttgatgtatgtcaaggatcatttgtgtttttgctttgttagcagcaggaacaatctgatcataagccttttgcttttctaggatgtgccagtataatagggccacatcaatactataattattgaaggtccaaacacccaggaggtgtttcccaactaattcccaattatcctgtctactttataggagtgtgtaactgcccccattgaaggaagctcattaggactccaggtggttagagcagtacccccaaacagaaggactcatcagtacaaacaggtgtggaacgtcgtgatcaagccactagatgaaagagcagtggtcttacccgcacggacagtttccattcacatagcatttaactccaccgagattcctcttcttgaggctcagctgcttttgggcactcagcagcattggcctcctagagcacctcagccacacctcagctgctcttggttcagatacattataggcagtgctagtgggccttgagtggctactgaggttgctgttgcctagatgcttgtagtcccagcagccaccatggggagacagcacatgacgggagactttgtacctatctcccatctccatgctgggatttctgtctagcctgagcttgtgcaggtcttgtgcatgaagtcataacttctttgagttcatatgtgcagctgccttgccgtgactaggagacactgtttccttatagtcatctgctggtgctgacttttaccagctttctgtcacctcttctgcagtgaaccctaagccttagcaggaaggtgtgtgatgcagtcccatttagggctgaacattccacagctcctattttctgtatcatggtcagttagaagcttctctgattaaagttgtatacattaggagtcagcttaatactgtgtctagaataatagtagtgtgttctttctgatgtctttgacccatctcggcccaggttgctgtcctaatgatggtgccaggcatgagtttgatttgatggagtaagacttaaatccagcgatgatggtgaggatgatgtcaactattcccatgatatttttgccattattgtgccagtggcatatctttacaagttagtcattgttgtattttaaaggtttcatatttggtaagattgatgattacttttctccttcagtagcttacgtagtgctttccagaactatgacatctagcctgtatggatgaagttgccagattagtaccagaactaattcttgatattttatagttcaagtatgttgtgtcttcagcagtagggtcttaccatcaagttctggaggataatgaaaagcattgaaaagcactggaaatagcctataatgtttggagactttatatgatcttactagccaaaaatccaggaaaggtaacccatttctggtacttttttttttgaaagcccatggtatctactagggacattctctcccaattgtaggtaataccattttatatttctgtctgtctgtctgtttgtctgtctgtctgtgtgtctgtctgtctctccccctgagtgttcattatgaagtaatatatttacataaagctttttttccaaaggctttcagtgttagttatccctccacacatttctaattccctactctattgtgtttccatcacctactctctttaaccattcctgttccattattgccctttaactcttgatgctacactgttccatctcccctcacttgaaagctcctccatcatgactcctaatttcctgacttccatgagtacacgaaatgaaatgattatgttggttattcttactatgttattccaaatgaaacacacatatccaaagatttaaagctaacgtccacaaagatgagaaaattttacagttgtctttctgggtctgggttactttactcaaaatgactgtcttcagctccatccatttacctgtgattcttgttatttaagtttttaacagttgaataatattccttcatgtaaatataccacttttcattatctagtcatcagttgatggatatatagacttttttctcttccatggtatcatgaatagaacagcaatgctttatgttaggatttagtgttctttgaacatatgcccaagagtggtatagctggatcatgtggtacagctatttctagcattgtgaagaacatctatactgatttccatactggctacactagtttgttctctcattagctttacatatgtgttcccttctccagcatcatttataccctatatttgtcatctgtttcttttttaatctcagccattataattggggtaaggtgaaatatcaaggtagttctaatttgcatttttctgatagctaaggatggtgaatatttttttaaaaatgtttttcatccatttgtatttcattgtttgaaaactgtttagtttcatgcacaatttttaaaattgggatgtttgttttcttgctgtttagttttcttttagttctttgaatattataaatattaatctttaatcagttgtctagcctatgaagacttctccccattccgtaggccacgtctttgtttgaattatggtgtcctctactctaagaagcctttggttttgtgagtgtgctggatggtcttatgtcagcttgacacacaaactagagttatgtgaatgaagggagccttagttgagaaaatgtctccataatatcaaactggaaggcattctcttaattagttattgatggggaagggccaagcacatggtggtgccacccctggactggtggtactggcttctataaaaaagcagagtgagacacacctcacccctgtccgcactccgccctctgtcctccagctggtgcccaagcctcaggtgagtctgggcgctgctctgcccccaacctcccccattaacccctgcttgcttctgcctgagaccccctcctccccagacaagagtggacctgcccagaccggtaggcccaccctgagtctagacatacctcacccctgtccacaatctgccctcggtcctctggctagtgccccagcttcagaccagaaggcccaccctgagtctggacacacctcacccttgtccaccgaccaccctctgccctctggctgctgcctgagcctgagccctcctcctgccacctgagagtgagagactcctcctgctcccactggaagaaaggatgggaagactacagagtaagaacacactcaacagaaagaccaatatgacgccaccagaatctagggactccacaccagcaagaactgaaaagaccaacgtagaggatgaagaagagatggaccttaaaaatgattttatgaagatgacagagaccattaaagaggaaacaagaaaatcccttaaataaatagaagaaaaaacaagcaaaaaattacatgaaatggaggaaaagacaaaccaaaagattcaagaaataaacaaataccttaaagaatctaaagaaaaccaagaaaaaataactaaacaagtgaaggaaacaattcaaacagttcacggtttgaaagcacaattagaaacaataaagaaaacacagaatgagtggatgctggaaatagaaaagctgggtaaacgatcaggaatcactgatgtaagcataaccaatagaatacaagagatgaaagagagaatctcaggttttgaagactcactagaggatatacagtcatcaaccaaagaaaatctcaagtccaacaaatccctaacacaaaatatccaggaaatatgggacaccatgaaaagaccagatctaagaataaaaggtatagaagaaggagaagaaattcagctcaaaggtacagaaaacttattcaataaaataattgaagaaaacttccccaacctaaagaaggatatgcctatgaaagtacaagaagcttacagaacaccaaatagattggaccacaaaaataagtcccttcaccatgtaataattaaaacaccaaacttacagaataaagaaaaaatattaagatcagcaaaagaaaaaggccaagtaacatacaaaggcagaccttaccgaattacacccaacttctcaatagaaactttgaaagccagaagatcatggatagatgttctacaaactctaagggaacacggatgtcagccaagactactgtatccagcaaagctttcaatcactatagatggagaaaacaagatattccatgacaaaaccagatttaagcaatacatatccacaaatccagccctacagaaattaatggaagggaaactataatgtaatgaagataactacgctcaaaaaaccataggcaatagataatcccactttaccaaacaccaaaaacaaaaagtggggaaatccacacacaatagcaccaccaccaccaaattcaaaacaaacaagaatcagcaatcaatggtcattaatattcctcaatgtcaatggtcttaacttgcctataaaaagatacaggctaacagaatggatacgaagatagaatccatccttctgctgcatacaagaaacacatctccacttcaaagacagatagacctcagaataaagggttgggaaaagattttccaatcaaatggacccaagaaacaagctggtgtagcaatcctaatatctaacaaattagacttcaagctaaaatgaatcaaaagagatgaagaagggcatttcatacttatcacaggaaaagtccatcaagatgaagtctcaattctgagcatctataccccaaatacaaaggcacccacatttgtaaaagaaacattaataaagatcaaatcacacataaaacctcacacatttataataggaggcttcaacaccctcctttcaacaccctgctctcaccactagataggaccaccagacagaaacttaacaaagaaataaaagaactaacagatattatgacccaattgggtttaacagatatctatagaacattccatctaaatgcaaaagaatatacctccttctcagtgccacatggaaccttctctaaaatcaatcacatactcggaaacgtagcaaacatacaagatacaaaaaaattggaataactccctgtatcttatcagatcaccatgctttaaagttagaattcaacaacaacacaaattgcagaaatcctacaaactaatggaaattaaataatgtgcaattgaaccattcctgggtcaaggaagaaattaaaaaaaaaagaaattaaagacttcttagaattcaatgagaatgaagacacaacatacccaaacctatgggacgctttgaaagcagttctaagaggaaagttcgtagcactagatgcccacatgaagaaactggaaaatagtcacactagagaattaacagtgcaactgaaagctctagaacaaaaggaagcaaacactccctggaggagtagacaccaggaaataatcaaactgagggctgaaatcaataaagtagaaactaggaaaacattacaaagactcaatgaaacaaagagttggttcttcgagaaagtcaacaagatagaaaaacctttatccaaactaaccaaaaggcagagagagagagagagagagagagagagagagagagagagagagagagagagagagagagagcactaattaacaaaatcagaaatgaaaagggggacaaaacaatggacactgaagaaatccagagaatcatcaggtcatactttgaaaacctgtactccacaaaattcaaaaatctaaaggaaatggacaattttctggatagatgtcacttaccaaaattaattcaagaacagataagcaagttaaacagacctataacctctaaggaaatagatgcagtcatcaaaagtctcccaaccaaaaaagtccacggccaaatggcttcactgcagaattctaccagaaattcaaagaagagctaataccagtactcctcaaattgtttcacacaatagaagcacaatgttcattgccaaactctttttaggaggctacaattaccttgatacccaagccacacaaaaacacaactaagaaagagaactacagaccaatatccctcatgaatatagatgcaaaaatactcaataaaatactgccaaactgaatccaagaacatatcagaaaaatcatccaccatgatcaagtaggcttcatccctgggatgcaggtttggttcaacattcaaaaatctgtcaatgtagtccaccatataaaccaactgaagaagaaaaaccacatgatcatctcactagatgctgaaaaagcctttgacaaaatccaacatcctttcatgataaagatcctggagagatcaggaataacaggaacatacctgaacataataaaaacaatatacagtaaaccaacagccaacatcaaactgaatggagagaaactcaaagctattcctctaaaatcaggaacaagacaaggctgtccactctccccatatatcttcaatattgtacttgaagttctagctagagcaataagataacaaaaggagatcaaagggatacaaattggaaaggaagaagtcaagctttcactgtttgcagatgatatgatcatctatataagtgaaccaaaaaattctatcagggaactcctacagctgataaacaccttcagcaaagtggcagaatacaagattgactcaaaaaatttagtagccctactatatatggatggtaaatgtgctcagaaagaaatcagagaaacatcaccctttacaatagcaactaacaaaataaaatatcttggggaaacactaaccaaaaacaagaaagacctgtatagtaagaactttgtgtctttaaagaaaggaattaaaaaatataccagaaaatggaaagatctcccatgccttggataggtaggatcaatatagtaaaaatggcaatcttgtcaaaagcaatctacagattcaatgcaattccccctcaaaatcccaacacatttcttcactgaccttgaaagaacagtactcaaattcatatggaaaaacccaggatagccaaaacaatgctgtacaataaaggatcttctggaggcatctccatctctgacgtcaagtgggggacagagctaaatagagaattctcaacagaggaatccaaaatggccgaaagacacttgagaaaatgctcaacattcttagccatcagagaaatgcaactcaaaaccctctgagataccatcttattcctgtcagaatggctaaaatcaataacaccaatgacaatctatgctggagaggatgtggagaacgaggaactctcctccatttctggtgggagtgcaaacttgtacagccactttggaaatcagtatggcggtttctcagggaaatgggaatcagtctacctcaagatccagcaatccctctcttgggcatatacccaaagaatgcatattcatacaataaggacatatgttcaactatgttcatagcagcattatttgtaatagccagacctggaaacaacctagatggccctcatctgaagaatggatagagaaaatgtggtatatttacacaatggagtaccactcagcggaaaaataaaacaatggaatctttaaattcacagaaaaatggatggaactagaagaaaccatcctcagtgaggtaacccaatcacaaaatataaacatggtatgtactcattcatttttgatttttagacatagagcaaaggatcactagcctacattccacactgccagaggagttaggaaacaaggaggactctaagagaagattgcatagtccctcgaagaagggaatggggacaagaacccctgaccaaattgcagcccggggccagggagtggaaggagagtcttcatccagttgctgttcaaagcagaaacagacacccatagctaagcactgaaccatactactggaattcagttgtggagggttgagcaaaagagccaagacagggatggagggacctgcagaaacagtggacctaacctactgatagaatggagatcctagtcataaacctggggaaacagcattggaccaaaccaaaccctctgaatgtgagtaccagctaggagcccaagacagtctatggcttctctgacagcagagccagtctttatccctagtgcacaaatggactttgggagcccattccctgtggagggatactattgcagtcctgatacaacaaggaggctctagaccccaacccaaacaatatgacagactttgaaggtccttggtagacagcctcactatccctggagaggaatcagggatggggaacatgggaggaggggagggtgaggggctgggaggatggatatgtaaatatgagtaattaaaaataataaaaaatttaaaaaaagcagagtgagcaagctatcagaagcaagccactaagcagcaaccctctatggcctctgcatcaattcctgactctaggttcctgatctgtttgaatttctgtcctgacttttttgaagatgagctgttatatggaaacataattcaaataagtcctttcattcccaatttgctttttggtcatggtgtttcattgcactatagaaacactaagaaaatggagtgtcatttattattatcttactgtttgtactagtgggatcctgcagaagttcctttcttataccaatgagttaaagcctatttgtttcctgtatgagaaccagggcatcaggtattatgttgatgtcattgatccatttggaggagagttttctgaagtagataagaatctagtttatttttgttcatgtggccatcctgtttggtcaacaccatttgctgaagatgctgtcttttctctaaagtgtattgttggcctctttgtcaactatgagtggctgtaggagtgttggtatgtatgtgggttctcaattttgttccattgatcaatgaatgcattttatggtttctcacactgttttggtttttattactatagctctctaatataactttcaatgtgaacttatagtacacctagtaatcattttattgttcaggattattttggctatcctaattcattcatatttccatagaatttaaaattctttcaatgtctttttaggattgcattgaatttttgagtttcactgaaatttatagaatggacattttcactatattatcctaagaattcatcacatgggtggtatgtccatcttctggtgtcttcttaactttctttgtttcagtgtcttaagtttttcaatgcacaagtctttcacttccttgattatatttattccaggttatcttttggaggctactgggaatggtattgtttctttgatttctttctctgtatatttgtcatttgtatattggaaaactactgatttggtgtgttaaatttataccccaatattttgttgaatatgtttataagctgtagggggccttttcccctgtaggatattggtcagagtgaaacattgaaataacccactatcactatgcttttgtcaacctgtgatttttaaagctaatactgtttcttttacaaaattgaatgcccctgtgtttaatgcacatgtttgagttgcaatatcttgttggtgggtttctccttaatgaacaaaagtgtttccccttatctcttgaccacttttattatgaagtctattttgtcagatattagaatagctacacatctttgtttcttagctccatttgcttgtaataatttccatcattttaccttaagctagtatatatccatgatggtgaggtgtgtttattggatgcagaaaaaaagaaataaaaattttaaaaagattctattttctaatacaatctattagattgtgtctcttcattggagagttttgactattaaaattaagagttctaattaaacaatatgtatttattcatgtcattttgatgcttttatcctgtgttgctagacatcatttgatttgatgttctgaaattgtttattttttctttgtatttttaagtgttctctatagtattctctgaagagatggcttagtggtcatatattccttaaatctgtacttatcataggatttttccctttctcctttgattatgactgatagctttgttgggtatggtagtttatattaggatctgtggtcttttataatgtgcagaacatctgtccatgcccttctggctttcatagtctccactggaaactcagctgttattctaatgggccttcctttatatgtgactttatctttcttgaagtttttaatatcatatttttattgtacatttagtggtggtcaagttgcagggaggcaaaaggtagtacatagcacttagttatgtcatagggttggttggagttggttgtttgagtctaggctcttcagagagagggctgaactggagggtaacaaagcatgggtagagtaggcgacttgagtctaggatatcaatgtgaggatagatagaattggtgtttcgtacttaggttccatacctagagagggtggttgaaaggtgtgtgccaagggacatgtggccctcaggacagttatgagggtgggtagaatgggtagtgtgaatctaatgtccctacctagaaagggtctgctgagtgcctgagaggatagattgagaggatagattgtgcaacatgagactaaggtcccttcttagagatgggtggagttggtgttatgagtctgggatccctacctgaagaagggggcaatagattgggcactaaggcaggcatgagacactatcttttaggatgttatggagggtggagtctcattgtatagtctagattgatctcagactcataattctcctgcttcagccactcaagtgctggtataacaggcaaaaaattgccatacatgacataattttttatttacagtattttcaattggtgatgtaaagatgaggagcatctgtgcttcttggtctatagagctgtaattagaattaaacaaaatctctatatgaagtctgcttcatggtaagccttcagaaagtgctagttactattatgacaataatttgtttctattactattgatcagcgattaaggggaatactaacatgcatcatcaccttcaatgttcaaaactttcagatatctaaaaaagcagaattacaaggtatatgcatacatacacacctatataaattaaatgcttctcatggcattgagcaccgtcactgtttttttttttttttctaactaatcactcactctattgtccagtagagcagaccttctcttttaaaaacatgatacagctactaacccattagagacttgttgctgcttctttcattcggcatgcatgactcacttgtattgttgagtatatcagaatcccttcaactgctgaataatattcctttccacagatgtactacattgcttgtttatccagtcagtagtttatggactatttccagtttgtacgtgtatgggggtagcagacatgaacagcccctgttcaaatttttctgtgggcaccagagggcttttttttttttacctctgggggtacactattggtatgaactattacctcttccttcatgatttactctctataagaccactttggggagaccctgtgaccttagttttcccatgtgattctatttccctggctctgtttattggataaagtggacacttagcccttggtgagtgggtcattattttttttcctgaagttctttaggtgtgacaggcatgaaagggtagaaaaagttaatctataaaagcagtccagagagagaaacagaagcaaggagccacagcttgttcttagcaaagtaatttttcatgttattaaatatgaagtgaatgtttagatttctggcagtcttttccctatttgcttgttataatccaaagattctcactttttttttgttcggttttggttttttgagtcaggatttcttggtgtaaacttggctgtcctggaactcgctttgtagaccagattggcctcaaattcacagagatctagaaatttgcctgtctctgcctcctgagtgctgggattaaaggcgtgcaccaccaccgtccagctggattttcacattcttaaaggctaaaaaacccaacagaactttcttttagcaacatgtgctgcttgcttaacctaacgtggacatgcatactgcgtgtcctgtccacactatctgaaatgaagtggggcagaggaatgcagacaatgggaaaacacaccttggcacaattattaatctccatttgaaggaggtctgacaaaagtacacacaagatcagatctttaaaatggctcccaaggagctgttgccaggtctggcatcctaacctgggccctttcaagctttttaggatgacaggagagatagattgaagcttggggtggggtggggtcttggaaaaactttgttttgcaacctgacctactactggtgggacacagctattgctcatgcagctcagtatgttctggttcattgaccttcgggtcagtaaattgggctgtagatgaaagaacatggaacttggcctccagaaccaggatccaccctgatttcatcatttattagccatgaactttgcacctgtcatttaatcttgctgaaagtctgtatttcatcgacacagcaggaatatgagtgcctattttatagccttattggctgatgacacaagataatgtttgcaaagtggctagcaaatcacagtgctcagtagatgcctgttcaacatgaatgctaggcaaacagcaaaaacaaatgctgcagaaaatgtcactggatgctagcaacgaggctgctacttggaggaataatttaaaaaatttccccagggtagtttaatttttctcagcgtaatgacaaggttgacacaggggacccccttttaaatagtagataacagacaagaggggctgccattcattctttcccttctctttgggtcccaggtcttttatagattggagctgacacatgctcaggaaaccaaggcagatcaactgcttggcttctaacaagccgcttgtgattttagctagagtaagcttaacatcaatggcccctttgtggactgttctgttctgtttttcttaggtgcaaaatgccagcctggtcaagatctagagacatgctgttccattgtaataggatatgcatttaaatgagagctgtgcaggttggaagaggccttgctagcatcagattcagcaagcagtgggaaaatcagcacagtcctctggactcgcagagcctgcagttcttggggctggacacagtactggctaagagcagcctactcctagtgtaaatactctgtgtctgcttcccccatggcagtaaacacattgcaaacaaatcctcctatgtgctccctttctttctagcctgtggtttcttcacttagtagcttcagacagacatcttcccaaacctgggtataaactcagatttccccagtacactggctgcattgtagggttttgttttcttacaagaattatattattatgcgagtcagaaactaaaaccttaggtttgtgtgtctatgtatgtgtgtgattccatttcaaaaatacatcttttttttaataggtgttaatattgggattttaacaatggattttaaaatatttgttaggctctgggaactgtgatgatggtgtgggggtctgagggtgcttctgtttcaaatgtgaaactcatttggtgaaattcagagaactttctaaagatttttcaacttagctatttaaatacccaccaaagattttctgtggaaagtgcacaaaattctttaaacaaaggcccatttcttattttaatgcaaattagtacaatttggagagtctgcctatatttctaaatataataccacataaagtcagtggcacattttttattatccactcacttatactaacctctacttctgaaagcactataggaatgaatagattcctctcctttaaaaagtaggctgcaaatgtttagtgcaaagacgaaagtctgaaagcatccaggaagcagaattcccatggaaacaccacccaagcttgagatgtgtctcgaactacagcaaagaagaatgaggctgtaagtatccacccctcctccacttcaccaagatgggtgccaagggaaacagcacccacagtaccagtcagtgccatgtacatggggaacctggaggccattccggagctgcttgcaagagcctcatttacagtaaagtaaccaagcatgagactggaattttaatgcgaaagtttcagcttttcggaaatcctagctatcaggtgtggtgatttgttccaataaaccatgtggagggcagaggaaagacagggaacgggaatttagtcaacctggccaggctgagaagcagagcagatgcagtgatcctcaaaactttcttgggagcactatcacagactttagttgattcagaggaagagttggaaaagggggcaagaggcatgactaacgaaatgtcccggtcaaggtgcggtctggttgattatagtctcagttcttgttcttcagggtggctcaggaagatgttcctgcttcagggtacagaattctaataatagatagtagctacactcccttagagggtcatctcacaatgggatgattgatctgtgaggctctgccgtttctggaatccaaagcatctgcagacttaggagactagtttaggactttcaggcaccatactgaggtcggagcagaacattgtaaaagcctgcagctttgaggtggtgttgttatggttagctataatctgtctttagaaagacactcctggagtggttaatgtgtctaactccagctaagcagatgactcaaaataaaggagggaaacacaaaatgaaggcagcaatgccagtttttactgcttttagccttgagaagtccatgctttgtagcaggaacagtgtctaaggactccttggttccatttgtctatttgttcctggtttactcaccttcctggagtgacagatatttgacattcctatggtttctcttctggttcacttggtcccctctagacgaccaacatggctacttctttccccttttgtgttttccgagttctcaaggtggagacacaaggtaggagatgaagggagggaaactctgaaggataactttcttccataacactttcagttttgcacctctagctgaggaattctgcagagcattgaggatatatgtgacctgttaatgctggacttgtaaagactccgaggacagctcctctctcagcccaggtggtactgccctctccccaagcctgaaattagtgagccaatagtctatattttcagagtttggcaaggtctcgactggaatgctaaacctctgacagaagcagtcaattttttaatgacttgggggatgtagaataggtcatgaggatgaaaattgatttaaaaggggaaaagtccattttagatgctgagaaatgggtcattattagcgaggagaggaacgggaaataaggctgtaacatgccagcctcagatggaggcctccctgcttcgggtctcagcaaatctccaccaatgctcgaaaaaatatgagcagcaacaaaaactaaggctgtccaggaaaatctacaaagtataacaacaaacctttaaataaaatgcatttctgggtatgaggtgccctgaacaagagcaaggcctatctttagtgctatactcattggtgcaggccctaagatgtaaaaaattgctcaaacacctacacagtattacgctggataaatgcacaagcaagcttgaaggtagggttaagaatgaatgcatttacaactgtacaccccattcttccatgtactcttagaggacagtttcaatgtattcaggaccatttgtggttaccaaaaatgaatgaaggagtaaacggtacagataatatgaatccccaggtccctgttcagggagaaactggctctgggatttctgtggaaaacttcagacttctcaggatgttctgtaagtttctcctaatggactaaggtagttaaagtgtcacttggtaccaagtttgaccttcctgaagacagcaacttcgtatctctcattgtctttttggatcacaccacttcaatgtgcctcaaagaaagagatttggaaaatagtcttagtaggaaattcatacagagaaggcccaaatccaaaaggccagcattggtgctcttgctccatctggaaaagtccaagttctagcactccaatttctgatgagtgggcatggcagattgagcacaatggggtcccgaatgtggacagtctactgctatggtcctgggctcattgtagaggaatcagtttggtgtcttagcctctcatcaaagccatctaccaaagtatctgagtagtgcaaaggactctatgccttctaaatcctgaacctcagattttattaagggagcatctgcagaaatgtcctctgattatctgctttaccaaagatgaaaggtgtggaaggtggcctctccaccctttgtgaacaacagttgaggcattctttggaatctggataggtgagtaggaaaaactcagtgaatctcagagctcttcagtagctttacaagaaagattctatgtgcaaatgatacctgccgggacaggtaaaatccgttttctccagtggagtgttacaaagtctatcaactacactccagggaaggacctatgtccaagagaatatgactaatattcaaaagactccatgtttttttgttttcttttggtatttttgtcttactgttttctgtttgttttgtttttgagagagagggaggaaggtagggagggagagaggaagaaagggagagagggtgaagttgggtgggaaaggcagggtctgggaggacttgtagaaggagaaaaatatgataaaaagatattgtttgaaaaatattttaataaaaataattaaaaaacaaagaagaaagacctcacatcatagaagcgatgccatcttgctgtgaatcatgtgggagatttacgtaaccatcttcatgggatggacatatgaggcttctgcacatggtgttatgtagctagtaatatgactgccctagacccaggagggcatgctagagaggcaagtactgcctcctgtttgtcactttccaccaaagacatcctgctcttgtaatgaaaccctgggacttgagagtgtttccttgagaagctgtgcgactattgctggtaagggatggaatgcatagcaggtcacaaccctgttttacattgtcaccaaacacagaagacacttgtacctaaaggggagaccaattctagaacactcaagttctattgtcttttttcaggtttcgaggagtccagactgactcaggtagcttttaaaagtaagttcaaactacctcagaagaccagagaaaaaggctgtagggatgtggaaagaaacatttttagagtgcatatataatgcaagcacaaattcaagacatttgcaacaaggcacaggaaactgatgagtgaatgaatgggatccggtctcacaatgctactagaggcaaagatggagggagggagagactattactgaactttcaacccaggcaatttttagtctttataatcatttgaaatattattttagagtctctatgttatatatcataaaaaattaacacccactcatatccaaaatgaaatatattttttcttatgaagtgataagattttgttgtttacaattaagattatttgccattaattaaaatgtaatttgtgattgactgtgattttttgaagtccttgttcattcaaagtattttgctgaatgaaaaaatatatgctacagattgtcttccagttgtgatgaaattttacaatatttaatgtgaccattgacaaatttggaacatacaatgatttgataaacattaaacatcattcattttgaatttcaatattccttttgcatgtcagaggtgttaatgttaatattttttccaagtctctagaatattcacaggtctggaagtatctctcagggtctcatcactgggcctacagtgcctgttggatgaagcagctgttcctggctgaagccatcttaggaaggcagttgctaacacaggcaggcaactgggtgcaatctggaagaagagccttggatgatgtaataaattgcctttatttcagttttagatttagagtggtgtattgtttccaaggcttacttcatttcatgccctgctgaagagaaaggggtggggttagatagggctagtgaaggcagagggaaggcagaaaggggttctgtgtgcttaacttttactttttgtttcacaaaagcatgagactgcataacagacaagtgtgtaacacaacagaaataacattgttctcttattcctcactggggaaagaggaatttctttgtatactgtttttggaaaagtacttgggaatgacaaacagactccaacggtttgagtgccagtgggcactcagagatgaggatcctgcctcagccaacaggggaatggaaagttcaagattcctgtgggagcatccaagcccagggagtaggtgactggagagcttggttttacggggatggcctatcacgtcagagacttcagaggagagcagatggacttaactgcattcttcctgtgggtttggagaagggcaaagtgaagttggtaacttatatacccaaaactgagaactggggcgctttagatccgagcaggacatgtagaggagggaagcatgagctgattagagatgacctgaaatcaagctgtaagcacctggcacaggttttctgagacctagaagaggggcagatgaaatgactcagtgactaagagtatttgctgcttttgcagaggcctggagtttggttctcagtacctacatggctgctcacaactgacagccttttctggcccctgtgcacgtggtctgcacacaagtacatgtaggcagatactcatatgcattaaatagataaatgagcccataaataaataatctagaagtaattaaacataagttctctaataagacaagtaatgtggtaatgtggtagtatttgtagttttatttagggatcttttcatttcccttgagtctgtccatctctttctaaagcagtcattaatgttcctttctctactgttctataagctcccttaactttttttttaattttaaattttaattagaaagaaacttattttacatgtcaattccaggtctctctccctcccctcctcctctaccccacactcccgctgcccccaactaacaccttacttatcctataccctttctgctccccagggagggtgagccttccataggggtcttaaaattctgtcatattctttgggctagggcctaggccaacccccttgtgtctaggatcagggagtatacctccatgtgggatgggatcccaaagtccattcttatgctagggataagtactgatccactataagaggccccatagagttccaaggtctcctcactgacacccatatttagggggtctgcatcagtcccatgctggtttctcagctatcagtctgggagccaagagctctccttgttcaagtcagctgtttctgtgggtttcaccagcctggtatggacggacacctttgctcatcagtcctctttctctgcaactggatttcagttcagtttagctgtgggtgtctgcttctacttccaccagctgcttgaagaaggctatactatggcatatgaattaactatcaatctcattatcaggagagagcatttaaggtagcctctcctctgttgcttagatttttagttggtgccatctttgtagctctccagatctttccctagtgcctgatttctctttaaacctataatgtctccctctattatgctatctcttatcttgctctcttctgttcttcctgcaactcaacctccctgccccattatgtcttcctcacccctactcggctccccttctcattctcctagttccctctcccttccccccatgctcccaatttgctcagaggatcttgaccctttccccttctccaggggaccatgtgtgcctctcttagggtccttcttgtttacaagcttctatggcagtgtggattgtaggctggtaatcctttatgtctaaaatccacgtatgagtgaatacatatcatgtttgtctttttgtgtctggactacctcgttcagaacagtttcttctagttacatccatttgcctttgaatttcaagattccattgtcttcccaccccacctctcccctctgagtagtactccattgtgaaaatgtaacacattttctttatccacttttcagttgagtgacatctaggttgtttccaggttctggctattacaaataatgctacgataaacattgttgaacagatgtccttgttctatgaatgtgcttcttttgggtatatgtctaggagtggaattgctggatcttgaggtagactgattcccattttcctgaggaatcacgatacagatttccaaagtggctgtacaagttggcactcccaccagcagtggaagagtgttcccctttctccacatcctctccagcataaactgtcaatgatgtttctgatttttgccattctgacagttttaagatagtatctcagagttgttttgatttgcatttccctgatggctaaggatgctgaaaactttcttatgtgtttttcagccattttagattcctctattgagaattgtctatttagttctgtaccctattttttaattggattatttggtattttggagactagcttcttgagttctttgtaaattttggagatcagccttctgtcagatgtggggttggtgaatatcttttcccagtctgtgggctggcgttttgtcttgctgactgtgtcctttgccttacagaagcttctcagtttcaggaggtcccatttattaattgttgatctcagtgtctgtgctactggtgttatgttcaggaaatggtctcttgtaccaatttgttcaagggtatttcttaatttctcttctaataagttcagtgtggctgggtttatgttgagatctttgatccatttggacttaagttttgtgcatgaccatagacatggatctatctgcagtcttctacatgccagcatccagttatgttagtgccatttattgaagatgctttctttattccattgtatagctttagcttctttgttacaagtcaggtgttcataggtgtgcaggttaatatcaaggttttcaactctattccattggtcaacctgtctattttcgtgccaataccaagctgttttcaggactatagctctataatagagcttgaaatcagggatggtgatgcctctggaagttcctttattgtacagggttgttttggctatcctgggtcttttgtttttccatataaagttgagaattgttttttcaaggtctgtgaagaattgtgctgggattttgatgggaatttcattgagtctgtagattgcttttggaaagattgccatttttgctatgttgatcctacctattcaagaacatgggagctccttccattttctggtatcttctttaagttctttcttcaaagactcaaaattcttatgatacaggtctttcacttttttggttagctttaccccaggatattttatgttgtttgtggcaattgtaaagggtgatatttctctgatttctttctcagcacatttatcttccatatatagtagggctacttattttttttgagttaatcttgtatcctgtcactttgctgaaggtgtttattagctgtaggaatttccaggtagaggcttttggttcacttatgtagactatcatatcatctgtaaacagtgaagctcccttaatttttgctgccttcttaccagttctgaagatctgaagtcaaaatgagtagtggcctaaatctgaggtattagctggaatgtgttacttctggggaatgtaagggagggtctgttcccttacctccttggacttccagaaataagtacatgtcttcatatgtggtcctttcctccacttctaagttatctgggtagcacattccttctcctcccctttatgttgctttcccctctctctgatgacatttttctattatcctcatataaaaaatcttgtgattagatggtgctcactttgataatcttggatggtcaccccttctcaagatctgtaacttcatctcatcttctctgtcttgattgacagagaagaaagtacaggttccaagaatcagaatgtgagcatattggaaggatacacacatcattcaccaatcctctttcccatgacaccattggattggtctttatcatatctgctaaaatcattaaccatttctagtacaactagtatctagtactttccttagatttttacatgatggctctgctcaaagctttcccttcctcaaaaccattacatatttgttattgaatacagaagaaatccggtagtcctcagcctttcatgcagacctccctgccagctcctatattctaccgcttcatgaattccagtcatatccattcatgtggacatcacctctacttaccacttctttgagataccatggtcatttccaagtatttccttctctattttctgtttgttccttgtcccattattccctttcccttatcatgcttgcttacacagcttttcccttcccagtatttacatatttcaatcatgctattttctaagaccactatacatgttatggagttgctttctccaaactgaaatccctccccttaaaggaaggagagactgatgagcagtttatcaggcccaggaagcctggattgaaagaagattcacaaggtccttctgcaaggttacacaaggatatagcttttttgagtcatcagccccatgagagtgtgctttctgctgctttggctgcttttgaatcatccaggctcttgtaagaaactccttacccttactgctgtaagtaagcctgacaaacttgctggttcacctaactaaacatggtttgtggtcagtgtcttctctgtggtgatcagacatccatttatatctctctaggagaagccaagcagcaccatgcattcatgaagttctgatggtcagggactctgcctgctttattcaattgctgtgataaaacaccatgaccataagccatgtaggggatggagggggcatattgggcttatacttccaggtcacagtccatcactcaagaaactcagggtaggaactctagcagggcagtatctggagcagaaaccatagataaacactgctgggtggcctactctggctttctcagaggctaatgcttgttagctttcttatacagcataggcctacctgcctagagaaggtgccacccgcagtatgctgggctttctgttttagttaacagtcaagacaatcctccaaagaagagtctataagtgaatctaatttggataattccttagtcaagggttttccctcagatgaccccaggctgtttcaagttgacaattaaagctaactaggacagggatcattgtaggcagagctttttgtaaggatcatgatcagctctgtttcaccagccactttccaaataaccagtcagagacttattattaattataaagtttagccaatagctcaggcttattactaattagctcctttttgtcactaattagctcttacaacttaaattaacccatttctgttcatctatgtgctgcctcaaggttcagtgagtcttacctctcctgcatgttctgtttcctttctgtctctctggtgactcctctgactctgccctccttcttcccagcattctcactgtcctgaaaatcctgcctagccactggccaatcagcttttcattaacaatgagagaaatacatatgtacagtgtacaaagattgttccatagcagaccatgacttgttgatatctcaagtcctcataagtacctacaactgtgttctggaacagaaacaagagcttgttggtattttagtctttgtagcactgcccatagtgtgctgctcattagacattcttggtatatatttatttcattaatgagttggaaaatttttaaagaacagccaaataatttatggagatgctctttaaaaaaattacatttaaggagcattaagactcaaatgtaaatgtttcaaatattttgatgtgttattattctgcctggaggaagatacctttcgccccctcccaccactctggactatacccttttagggaagcttagcattatgagaaagagtccccaggtcattctcaatccatgtgccccaatagggtttcactgccgctctggcatttgtgagcctctgatatgctgccaaatggcccttgtcctccaacagacacttctgttcacctctctgtgcagtgaattattcctctcagctccttatccagaatttaattccccctttctgagctgtactgaaggtgaagaaggcctatctggtctcccaaggggctcagtgccagcagaataattagctaggcctcctgccaactcagagctgtgatctggaccttcaaacttctgtttcagtgtgttggtagcagaaggtgttgggtaaagaaggacaaaacaggatcttctttcagatggcacaaacacagcataaacattagcctagagagagttaagaactgaattaagcaaatccttgttgggaagaaagacatgcactggctcatttgactaataagattctgacacatggcagtatttcctagaaaatttaagcctgtatttgaagaggacaaggctgacccatactggactgttgaatggcagttctctggacacagggcagctcagtgtgagcagacatgcttctgggaggatgtctgtgaccataatgaaagcactagcaggaaaagccaaatgcaatttttccatcttaaaaaaaaatgcagggagaaggagaaacgtggtaagacatataaagagcacatttgaccagaagacacattctggttttgtggccagtcacttaaatacaaaagatttctgtgggcgtgaggtttgaaaggctgacaagaaataaagcagcctcaggaagctgtctgtctgtgtgaagtactttgctggcaccagcgtgcaatgtggcggctgcatttggtatccaacagggaactatagatttttactaatactctcagaggaagagattggcaaataccctctaggagtcctatatgctcagaaggttggcttggccgccaggaaagcgtgtgaaaccccagaggatgtcacagtacctccccaatgcttttcctttatccactttggcgatagcttttaaacttgagagtgaatcataatggaattgcaaagtgggctcattatgtgagatggttgaaacagcttataatgtatgacaatggagatgtggggagcgtcagtggtggctggcagcaggcttggcccatgctcagttaatgaaggcagtggtctttgtgggtggctggagggaggatcccgagacagacactgtcttaaaatacgtctcctgctggcctgtcaggatgcttttatctcagcctttaaataaccactagttaaggcatagaggtctttaacaaccactaaaatgccagggctgccggaaggagtcacacattcaagtgtatcagcagttgagagaattcccttcaaacctgtctccttcccatgtttccagtctgttgctgtcacgctgtgtcacgattttcctattcttccacactttctctcacttttgcgctgtacatataattagtgagtcttgtcactttctcctctggttgactattctctatcccagtacagaaccctggtcatctacctgtgtgaatgtagtagtctcacgattgtcttctttctttttgtcctggctactagaatgcattcttcacttgcctctgccagcttttcaaaacacaggtctaatcgtgtcactgtccttaaagcctcgccatatctcctgagtggcagcagaactttctaaatcttggagtttgatggagcaggcccttcaccatctcatcactttccacttgtctcttgcccccaggtttcttgtatggaaggccctttcctctcttactgatacttaaggggaatacttttgtcaggaggtaggataggaaagaatcctgctttcctgggacttgcaatctaagtaggacaaggcagacgttaactatacagatgttaaataagataattttagatgctagcaaactctgtacagagaattacaatgggccttggagcagacagctccatggacagctccttccagttcagtcacatggtttcagagactccccagataccttgatttatatgaagaacaagtgaccaggacaaaaaaacaaaaaacaaaaaaccttgtgcaaacaagtcatgggttgccaaggtagggtaggggttgggtaggatatttggggcatggtcactataagcaaaatatatttaatcaaaacggtggcaggcatgggatgaatgcatttgggaagaaaaaggaaggcccgatgtctgaaaagagatgtgtaggaagaaatggtgtggggggaggtctacagatgagcctgggcaggtgggatgggcagaggcggcttcctggttggcaggggatgcttcaggaggttttcttcagaagagtagcctgatgctgaggtgagagctccaggccccacagaaagagcattcgggcctctttaaggagcttcctgaattcagccttccagtatgtggcttacctctgtccttgttctgttttcccttctattcccatttgtctctgtctgtcacagatcttaagggttctagggagaaatgtaaagctgccaacttcaccccctccctgtttaatctaaaagttttattgtattttatattctgagctctattattatattctcatttctcatctggtagactggatgctctagagaacagccctggcttcccccttaggttttgcaaatttctggcatgccatacacttactctcatttgaaaagctttgggatgcaggctacactgatttattttaaacatagtagattatttcttaatgtggattgaccttgctgattggggctctgatccactggggatggagtaattgtgggaatccacagagagagaaatcttggcctgtggatggggtaaagggtgagcccccaaaaaataaaataaagaaaaagaaaaaaaagtgttgaaagtggaagtgctaggcaaattttatctatgcttttattatttcataatatattctcaagagagttgtgcatactcattagaatgtgagttccacagctgggtgccacctcacccagagcactgccaggcataccgtaaatacccaatagctatctctgggatgagtaaaggcactaacaagtgatggaaactaaaaaggcctttagacagtgttcagacctgtgactcttttttagaacaccaagaaaaaatttgcagtgaataaaggtgacacccagaaatgatttgggatattgttattgacatctgggctggggtgtgagaaagagaatgtgggaaggagttaaaggggggaacagatattaaattaaagattcataggagaaaagaaaattagaaaaagggaaacaatgggtatagtttaaaaataagttcaaaattgacgcagattgagcatatttaatcagactataaaagtgtttcctaattactgatgacaaagaaaccccttgaaaggaagctttatgaagcactgtgcagtcaggttcagagccttgtgggatcacttgagtgataactgtgtgggtgttactcccaggagattatcattttctttctgaattcatttccttcagcagaaatgagagcctgcatcactcacagggggttcttatttcatgtgtaagatccttgctcagggctcaggaaatcacagggctcagagtaaatgcaacaggtcacagggggcctgtccagacttcagatcagaaaggtcagtcatcatccacaagagacctgaagatgcctagctaggaaaattatgcggcatatagaacattcttttcaactgtttgcctttctgtgtcaccactgagatcagggccccctttcctccttggcttattgaagactgcctcctctttgctagaatgagccttcatgttctacagtatgttacttatacttaattacaatgtgaataattcaattagcaagcacgaattattaccaggcagtttatccgtgtattcattcatccagcatttattcattcaggagttgctgaacagcttttaaacatgagacaatgtattaagctagtgtttgggacaccgagacaataaacatattatgtgcttttaggaagtgttgtgtgtctggtggggaacaaaagtggccattatgttagctgggtccttgaacttggatgtctctaatttcacaatggcttctgagacaggaacttggaagcagctgctcagaggataaacagatttggcttcttcacagccacgtggttggttagaaaatgatatagctgcaattgcaatgtgggttggcttggttgctcaaattacgtttctgttgttaccggtggatcttctcctcgatggtagcttggggtagaggaacacacacctcttcatgtttccaccagtggatttgtagagcaccacaagaactcaataaacatttgtttaggcatgaatgaagtaggacatactgctccccacccctactctgcacacagacacacatgaagcttcagaaccaatctttcaaggaggtttggcttttgccagttggattcctctttcctagttatgagtgcctgttaacctgtatcagtcagggttctggcaaggtgaagtaggaagtgttttaacaccaagaagctcatgcatcaaggagaagggctgcagccaaatcagaaggaaaaggcctttgctgacagagtctggagatacaagaagcagaaggaagttgtgacagccctgaagtgatttttgaaggcctgagtcttgccaggtgggtcctgtctgcagctcctccatggagaagggcggcttttgctttacaaaccctgaaccttcccatgctactttctgactctgaatccctgtggcacagaatgctggggaatgtagttcctctgtgaggccaggcactctggcacttgctgaaagatgtgcctggcctcttttgtttctgaggtaatgctcttcatatagctgtccaaaggacacctcccttcatccaagcaggccctctttacccaatctatctcactgacaacacaagagatttggcaaagtgggatttgcttctcaccggaacgacagaattcttcttttactttgctctacaaagacaaaattacaaggtctaaatctgggtgtgactttcaaatagagccctgcctggtgctgaactgccttgaagaatggtgaagggttgttttttttttttctccattgctttgagcttggtcagccctttgccaagtaaggggaagtttaatgaacccaaataggacactcttctttgtgtctgtaaaagttacactttgcaaaagctctggtcaagagccactttggagtaatgttcctgctggggaactctgtggccatctgcttctcttggtgagtttccttctctttgagggaaaacaaaggcatgttacaagctggaaaaagaagggtcacttgctacttgaaagagtgcattcaaaaatggaggcccagcctgatggggaggcatcgtaagcagtacttgtttatttgtccagctttacaccatgtaagtgatgcagaatcctttccgcctctaataataacagcacagcggccctgagttagtgggaaagctggaatggctgctgtaggtcagacaagtccacagctgtggttggggtggcaggaggtgaaggggtggttgggaggaagggcagagtgagcctgccctaaaatatttttgcctagttaacagatttaatgcatggtgttttgccacaaaactcatcaactgaggactttttttttttttttttgatcagggaaaacaaccatctaattcacagtctgtggatcctaattgtgcaagcagcacattttagaaagcttttgtgctggggtcttcatttgtagagcacttcctttgcttatacagtaggcaacagtgcttaaatggcgtaattattatgtgtttctagtttgcttcaaattttgattcaatcagagtccctaaacctgacagcctataatcaaacaaagggagctctcgaagggagggattaacagaggggaattaaactgtcgtttttgaaatagcttagaccaatatgaaagcccgtttaggagtctctccataaatatcccttttgttttgtctaattgctggtttgaatgtatcagactcatcaatgagattagggttaatagatgtttggtcacgcagaacatgcagaggaggaatctgatacacacacacacaaattgcacttaatgagcttagcaaatgtttgccatatttttaatgaaccctggggctgtcatttagaaatgcttagcaactgcttttccatccttgaaaatagagcaactaaaggacattaacactgtgcacaccgtaaataagaggagctatttaaagacagcagccctgaggaggggatgatgacatttctctgacccagagccagtgatacttaacactctgggtgtgggttcactatgcgacaacacagttgggtggtttaagttcccagaagggcactgaggagcgtgagggttttttgcaagggtcaagtaaccatttctttttttaagtcaaacctgtttaggattgaatcttccacccttctcctcagcccctgcttctgttttcacactttcctcctgccctttccaagtatgtgtggagaaggctttagaaagaggacgtctgtcctcgctcggcagcggcttccccagcccacaaccaccccagccctgagactgcggcttgtgaagctcagccaagcgagcagagcaacaaactcttgggattgattactcgggaagattgaatgatccatctttggagcccttgggatttggctctgaaaccaatgcagtcggcagtaatggggacttattgaaggaggctgtgtgtctgtgctctgggagcagagaccgagcctaaaagaatcaggttttccttggggaaggtttgatttgatagagcacaaaatgcaagccccatgcattatagttagagcaaatgaaggatgtcttccacttgcagttttccacagagccaattgatttcagggacttcctgctccctgccatctgtcccctagacgtgcctttcaaggaggcagaaatagacactacctcatttttaaaagtattagggactaagcacgggcacctttcggttcttctggaaaatgaccaagcctccagtgagaacagctgtactcttgtgttgaacgatggggtcaaaattcttataaggagaaaaatgaatgagggctgtttctagtgtacagaagcttggcaaagtggacagagttatgaactttctttagagacagtagaatgaaaaagtcagttttagagaagaacaaggcttgtgtgtttgcttttgctgttttgagggatgtgtgtgctcaaatgtgtgcacgtgtgtgtgtgtgtgtgtgtgtgtgtgtgtgtgtgtgtgtgtgcttacacttgcttgtgtgttttgttagtcatctgtcatcaagtgccccctgccctcaggcaattattagaatgcctggtttgatgaatgaagctgggggttttaccaaaggctttatggcttcctggtttaaaaacattgtcagtaataagctatttttcttttggaaatgtccagattcttggcacctaaaccggagttccgaaaaatcatttgttgaataaatgcctgaggtcagtggtgcacaccccaaaggcctacagcttttggatagtgacactgggtgagtgtagctgtggggaatatgagggaaaggtatgaacacagtaaaccagaacagtgctggttccatctgaggacccagtggcacttggtcaaatgctgcgcctttaagctctcaatccagactatcctgtccctactagttatcccaccagcttggcttctggaaatttagcttgactctgaccttttccccagtggtctattctctgaacttctttgttaatttcagataccgatttattttttcctctttccagtcctcatgggccagactatacctgggtcactctgatgaatgagttagtgattttgatctgtttcttgtgtgtgtgtgtgtgtgtgtgtgtgtgtgtgtgtgtgtgtgtgtgtgtgtgtgtgtgttcctcttcctttgcctcttctgtcctgcttttccttctgctcagacaaatgtgaagaaggatggaatgtactctctggaagttaacaagcattggcatggattgggacagtgcaaggaggaggatagagagggagacatgaccttcagcttggttctttgtgtgacttgggcagtggtaggactagctgtttccatgctatattcaataatcagctagctgttcaggaaagggcttccaaggagtctttagatactaagttctatgttaaagatgatgtgttttgagcaacttcgtgcacagataaatgtgtacatatgcacttatcaatattacatttaaaaatgctcatcagggctcaggagatgacttagtgggtaaaacatttgctgttcaagtgtggagacttgagtttgaacccccagaaccaactcaccaacaggtggctgaggtagtacagtctgtagatctggagctcttaatggtgagatgggaagccaggacagctagcctggtgtagggagctgcaaatggaagacaacatggaaggcaagtataaactgggggatgcatgcacacacagagacacacagacagacagacagacagacacatatatacacaaatacacatgtatacatgagtgcatgagttggggggaacaaattaaaaaggacatcaggtgaaaaattacatatagctgaaaacatggcaatgaatgtcccaggatctagtctttctgggatccatctacatttcttaatttagtgctagaccacccacaggcactcctcagtgtacttacagaaaatgtgcttacattgttttgtgcctcttaatttccttcagaaggagatgctctgtgtgtgtgtgtgtgtgtgtgtgtgtgtgtgtgtgtgtgtgtgtgtgtgatgttcatgtgcaaagtttcctaccattgcctgcctggcaagccttccacaaccatcctagaggcctcatttgtaatgaagccaattttccttccttttttgtcatttgaaaaatattttttcagctatttgtcgttattttgccaattctggtctacacagtaggcatttttgaggatatgcttaggacatgatgtgtccatgcaagttagaattgcagacatataccttcacctttgcttaaagagtttgtctgtctgaaaacattgaaggagctactagataaaggatggagaaacatcagatcattacaggaaagaaaatattttcttgctcttgacttttcaattgaccaaagggggtgggagatattacctgcccccgcccctggtaagtactagaggttcagccaataactttcctatcaaaatatataaatctggacagagtttgagtgcaaatggagaagttgtcttttgaatgaggagggcctggatgaagagcttggttgattgctttcttaagctgaggtttggctctttgtggtatagagttgattgaattcatcagcttaaggttaagaattagaatttagcaaaaaattttaacacaaagcattactacaggaaggaaaggtcactttagcactgagcttgcttttgagaagacttaaaaaattctttaaatataataaattaagaaatacgaatagtaaaaacctggccctcttattagttttgtttattcctaagtttctttttaaaatatatatttattactattttaattatgtgtgtgtgtgtggggggaccagaagaggatgtgaatctcctagacctggggctaacagtgacttgagctgcctgatgtgggtcctcaacagaacttgggtcctctgtaagagcagtacttgcatttaactgcttagccatctccccagacccccgagtttctttaagattgattttaaaagtaatttcaaacaattttatttttaaaaagtgtgctgataaatatatatgtgcatatatatatatatatatatatatatatatatgtatcattttagtgattttaaaacataatttggtccaaaaaagatagggagcttgctgtcctaaatgtttcttagagggagtgaccttgcaaatgtttatgtttagtgtggaaaatgaaaataaatttcttttccaataatatcaagagagggtttgattggaagcttagagtgaaaaatagcatattccgctctggcctcctttctcagaggttcagcacaaagaccctcacctgtaaaagcccacccactgtgaaatgagcctgtcccccaagagaaggcaggagtggggcaaaggttgacagctgactggtttgctccgtttcagcctctggctgactgatctatggctgctcatctgcttgggtcttctcagggcagggggggcaatatttgggttatttattctgacaggaggctagatgctatttccatctgccttggcgtatttgaggagataaatgtctgccatatcctgatgaatggcctctgaggttcattgccagagaaactgagttatggctcctgtatttcatttaaggggaaaaactccagccatccacagtgtgcactgcagccttccatgccatcaggacacaaagcatctttctgcttaaagaacaaggtttgcacagcagaatcttagaggcatgggagagaagaggataaagaaaacatactccatacattggggcacatatccatttataatatggaaggaattcaatgaccagaacacagttccatgtctctagtttaaaagtcatctttactcctgctttcatgtctttagtcaattagatcacgccagactacattatctttaatggtggcaaaggaggagcacatatactgaaaagctgtcaggtttatcatatatttattttctaagaaacttagaaaagataaaactttttgtacacatatcaattacatatatcaatggatcaaatgcaaatttattctggcacccactgattttcccatacagagtaggattgtcatcatctagtgttctgtagaagcgtttatatagcccatgttcatctgtccttgatacatggaattatattgaatggcttgtgtttatggacttgcagtgtctattgcatggacaaagccatatagaaaataatcagggtaatacaggacactggaaggtgtcattagaacctttgggaacatgtgtcaatcaccaaagcctttggaaaacagacaaaattatgggaactgtagagagtctttgcattcttccttactagcaaatgaggcaacctgaaatttcacttgcatctcttctgcttgtcctggaattgagctcatgctttatgtaaaggcaattattattaatgaaaggggaaagttttacaaagacaaaatgtgatctgagtaagggctacttacaagtgaagcccgactctggtctctggtcttactagctccactttgaggaatgtcctgaagagatctattgggaaattttgagccagacaccaagagttaggtaatgggagaaagacttgaagttacaagtcaaagagttcagttctggactcaagagaacttcctggaatgatactcatctatcatagtccaaggctgacttttgtcagttacagaccatgttgccttatctagtttgacctcattcaacacttagtggaaggaacattggaagaagcataatctcatcttccttgtgctctatgtgagttgttgtggtttgcagcaattgtagtcacatgcagttccacacagtgtcaatgtatgagtgtgaaatttcctataaatctgacttttgtgatgaacttgagattatacataaacacacacacacacacacacacacacacacacacacacacacacacatatccttcaaatgttttttcttgttctgggtttagaaactgaattctgaaggtagttcttactataataagcctcaatagagagtgcttaattatgatttatgtgtgacatccactaggaaacctctgacacttttaatcatgtctcatcttcacatgttaactgcctgatgttttcttttatgctcaaaatattctgtgcacatctctactattgtactatgcacataactacgtgtatctttctgaattgtaaacatttgcattccacagtgctgactatatggagcattcaacgaaggattcaattagtagtagttatttgattaatgttgaatgaaagggtgccgacatatagtgttctgaagcacaaatgaaacttagtttttccaaccccccctcaaagataactagctgttttctaaagtagtttcaaaaagttattccagagtacagctaaagaaagaaaaagaaattgtatgtagagggatgggatatatttcatgttgatgacaaatacacatgctatccaaaagggtcattaacttttgaattctggtgacttaggtattagagtttgaggatctcaactcacttatgctttggattaactcaacactcaaagaaaggcttggaatgaccatagttcatccaaggcaggaaagataattttcatattctcaagcaaattatgggccttgcaagaatcaagaattgtcagaaatcttaacaccaatctctactaacacaatgagcttaggcagtggaataagaccaatatcatatggccatgataattagctttctgccatcatgtctaaacatctgaaatatacaactgatgaggacaggtttattttagatcctatttcttttggaggtttcagtccatgtggagttggttcactgatttgggtactgtacatcatggtggaagcatgctgcagaggaactgttcacctgggcatatctgggagaccaaaagtgagaaagagaagggtgtatcactttatccttcaaggccatacttgcaatgacctggctcaattccagtaggccccatctctgaatgttcgcattacctctcgatagtgccatagactggagacaaaccttcaacactaaggcctttggaagatattcaaactatagaaacggtactacaaatgctcataagtgtaaggcatatgtagaatattccctgctccaggtctcagaggtagtttcagttatgtcaggtgctctgggtgctgtacagtttcactgctctcttccactgaggtcctattctgcaaagtaaactgaattttcaggaagaagcagcagcccctctgtacactgtaataagcatatgcccatttctccttccacatacagttcccaaggttcttctgtgagtccccaacttccaactaatcagatcagactctaacaataaacaggagatccccatttagagaactcagatgcatttctatgatattttcagagcagtattcttttggttttggtggttagcctccttagagccatcccaactctggagaagtaacagagattgctggagaggtgttactggaaccttgaactggatctgccttgcttggactgtggctgtgaaccctcaggattaatgcacaatttattctaggggaattgaaagctaaaagtcagtggtaatgttgctttaagtacttcatatatatttctacaaattttgtatgaccatagtagggggcagacttcatatagctgtccatttactgctggttttaggagctgtttgtaatgtcctttttcattcttttacattgtttatttgaagcactttcttgcgtgtttgtgggttctgtgagtagacatgtgtgctcacccagcttatcatcacttgacattttacacatataaatggtcacattaagtcaccagcccatgtatctaccttacacatttgggaacacaagcataaattgttcttttattcactcgtgattttggaacatctctggtctatttttagtttaagatcaacaatcacattttgaatgtaagcatttacaaagagaacaaataaaagtctttagattttaggcccctgttttttaagtgtagcatttctgaatatcagtttaaatttgactttgatttaataactcatcaaggatcggataagatttcaattgagtaatgctgatataagagctggaaacaggccaacatcacttgaaggccaggggagcacatctaattattgtgacccaactggagatgtgataccttgtccttttaaaccagctaaactgaggggaagcatgccaggactggggtttgccaatttggccttacatgccctgaacttgctgtctaggttgattcagtggaaagaacatgggctttgtagacaaagctcagattgaattctggctgttgcacttataaccttgaggctttgagcatattacttaacctctctgagtctcagtttcctttctcataaaacaaggattatacctcccctgcagtgctgtttgtaaagatgaaatgaaatacaataactcatgtctggtcactaggccaacacacagtggctactccagaactacccattctgttattcagttatctttctcagtaggtcagattaatgatagctgttgtccaacaacttattgaaaataactacttttagtaatgatgctcactccactagatctttaatgctgtgaacaagaatatagagcacagatacagcaggatcctttcttagaatacttatttttagaaaagaatgttagctcatggtaaagacatttgttctgactaccttctttccctcttatgtttgttttatttattagataattagtttaattaagtctctttttcttgatagcatagatagcttcattagtgctaatttctggctcatggaggcacatctccgttacagttgcctgtagattaaacagaaggatgcagttgtgttggtcaatacgcaaagagatgtcctccatatagaatgtgatgtgcaaagtattcatggaacttatcatccatggcattttaacacttgtttccatagctaaactctgatccagacatttgagaggcaggcttgctcttgccaggcctctcctttcagggcaataaattaaacaacttggtgacaaggtctggattacacaatttctttaaactacaaagcaaacctgaaatctaatcaggaatgaacacagcacagacaaaacgggtaagaatccacttctggtaacctttgtaagaaagtttgaatacacccatcccccttaatacattttgtttcccagctcccagaagcagcttcatatgttacacctggcagtgagatttgtggcaccatatttttcttatttttaagaggtgataccatatttttttaaatgagaagttaggaaaaaataaacagatggatagagattggtggagggggatatggtactgagacaaaaaagggagaaagatggagtgagctaagtgctaaagggcaaagcttcagtaccagacactgatgtatttgcatattcacaatatgtttctggcccagagcatgtttctctggcattctgtatgtatttctaggtctctatatttatctgtgtctctggcttcatatgtgagactaagtttagagttgtgtttgctggatgctttgcagtggtacttgaagaattccgtgttaagtatgcactggcagtgtgaatgagctgccctggcataggaggggaagtggaggagggaggtggagaccccggcacagtctgtggcgagggccagctgcagacagagtctttccatgctattttcatcatgggcttctgagccaatttatttatttttgggttctccttcattccaaataaaagcaggtgacactaatatcagactgtgccgcacaaggacagaagcttaccatgttgtatgtttcctcatgctatcatgaagttagtggtggatgattctagagaaaattcagaaaatacaagcttatttgagttttatttctttgcttcttcacttcaatgaatagataagaaagaaggtcattttggaaggaaagaaagtgaggccagtaatttcgtagaagggattgttacaaggataagtaatcttccagtcttgcagcacgacatgccttatcatttgttggtttaagattatgcatttgaggccatgttcacaatgccttcaccatccaggtctagataatactggtcatttagctgtttatagcatcagctataaaatttgtttggagctcggtgtattaagaacatgttcatttgatcattaagtatattgccttttagcgaagttgtaaatctagcattttatttaaaatttcttcacaaaggaaaattgccaatgaatttgcttccaattaaatgaatttatttgcttttcttgaataaaaaaaacagaaggtgaaaattataatgtaacattgcaaatacatgaaaaatctacagcatggtttgaaaaaatctgagaatgtatgttactatttgagcgtgtgtgtgtgtgtgtgtgtgtgtgtgtgtgtgtgtgtgtgtgtgtgtttgtgggtgtgggtgtgggtgtgggtgtgggtgtgtgagtctgtacatgtttaagggatgcttattttctactatgtctggtcctccactctgactcaggctccctgaaaggcatcttgcattctgtctccttcattctgaatcagtgtgctaccttatcaagatagttaagcaggcaggtctaattgttttctaaaaggatgttcaaggttcagcataaggttccttctagttataacggattgtggtgaaagatggaaagtaaaatcagtaaagagaagaaacacacaagatatcttgagaattaggtgtccacttccaacagtccctttctagaggagtcacaaggggtgtgcttgattccatcagcaatgacagagagatataaaatgtgtctaacaggacaggaaaggcagctctagtttctattttaagctcaccacaaagcctttctctacctgatacaaaggttctattctccaagaaggaatacaagagtctacacaaatcacattatttgaacaaacagttgagagtggtccattcttagctgggacttaaatttaagacccagtcaccaggcaagagccaactttgcaagcagggctgaggttagtagcctcacatctgctaagtgcttttctgcataggatatactcagacaggtcttaaagacagactttgatgacagcttcagattttaggtggcataggagcgtcgttaaaagatcatggaacccacctttcaaagggggtgattgtgtaggcaaatgctgaatccattggggttcagtgatccagatggagagctcaggagtaaagacagtctgaattatatagagaacatccccaaggacatttctcaaggcaaaagattgtgtcatcagttatcatccataggtagctagcatagaggcaatgaaggcattgttctcaagaagaatagaatattgctctattgttctctctctctctctctctctctctctctctctctctctctctctctctctctctcatttcctctccctctgcagcagataaatacacaaggactagcatagccagagttctattttttcattgtcaaaaaatatataagttgaccattctctctatgtacttagttgctctttggaagctaagaaaagtaagaaggagggaggaacaacagaacattgattggtgaactgtgtaagctatgagttctgttcatgctgaatggcatattctttacatttcttatggcattgattagacatttggagagcaagaccagatccatgactggaaaaaagaagctgtattcaccctatatctgcattataacatggtttaaactctgtggtaatcagggttctccaaataatactctttcttattagagtggcttacaggctatggttttgatagcccaacaatggctctctcctgatgaaaaggccaaaagtctgatggttgtcagttcacttgactgaatgtctcatcagtccaaatctggtgtcgagttccaggggattcatgagaaatactggtcttcagcctctgctagaatcttgaggaagcaggttctaacatgagcaaaggaatgcctcagcaagagagatgaacttgaaagccagagtgaggtcattcatgcaataacaaaagccttttttgtattattttatgtgggttgccacaagaaagtatggcccagatttagggtgggtcttttcacattaaatgatctaatgaggaaaattccttgtggtcttgctcagtacttgggtttcagtcgactacagaagtagttaagttgataagtaagattagtcatacaactactctattagtttttatttaatctgtgatctaacatattacattacaggtcagagatacttttaactttcactccccaaatactcttttcaccatgggctccttctagaattgagactatattgttactatatgatagaaatttccaagatacttgagattcaaaaatctaaggtaaaaatttccataaccaagcatttcaaggccacaaatagtaagcaatatgtcagagtctcccaaaatgaccatgcacaatgccttacttctttgtgtgacagtctgattcatctgctctactgtgtgtgtgcacacccatatatgtgtacacctttttattttgagacagcgtttccctaaagtgctggactggctatgaatgtggtccttttgtcatattttcccaacctgggattataagcctgcactatcagacccaacttccccaatgatttgctttgatcagaagactgcaaaagactgcatagtatatagtcctgagtctggcctttattatccctcacaaccctttttttctccttgggaggtctactgacatgtacaacatccacactatgaatatacccagttggttgtgtgacaaggccatgagagaagcatcaaaaaagtctgccaaaagcaagaagcagggccatagactcacaaccctgctgagctggttcccagcctctgacactgtcctagctaagatcgcatttcagggagcacatgctgtccacattcctaatcagaagatccacattcaaatgaaacagttagattttatgtgattaaattgagggaagatcattacgtgctaacaaacagaatgcaacatcagttagcattttatttgctgacaaaactagaaaggcaattttctgttgaaaatgaacacaaatgtcccttaccacctatatgaaatagtgaaattagccttcaattacttttcattattatcaaattttcaagtcattttaacagatcaaatcataaaacattaaattttagtgttttcttcccaagtagaaagtagaaaaacaccatttattctgttatttagccctcactagtgttgcactatttggttaaggaacttttcttagtctaatgaaatatttttttggttttcgtaacaaaatttttaaaaacttatgccaagagaaaactaacataatacatatctccatgtaacctttggcagttccaacaattgtccttcctgttatgtaaaaattatcacctctggagaatctgtttcatgataattctgtattcatctgaatcaattggaagagaagagagggagaaaagaatgagaacatccttcctattgcactcctgaggctgcctttttcttctccttaagtggaggcatattttctacttagtgctctagttagtagcgtagcaatcttgactctaaaacagaaatgaagtgattagccttcttaaacccccagcaatggctgcagtcaagtttcataagtgcctctgatataaacattcccagaaaccattttccaaaagggcagccacttacagaaaggttgaaataaaatttaaacaagacattgaacatagatttacaatagtttcatgacaaaaactgtggtttaaagtttgttaggagtttctgtggtttcagctgaggacatagtgtgtgttgaacattagctgtttgatgctcagatgtggaatccaaaaccacttggaaggtttaaacattggcagccacaaaaacaaacactagaccacattcccagaacctaaaggaaaccaaagcaatcataatagaaggcagatgaattgctttctatatggctgataaagctggagcaagcttcagctttatactcacaaggtaatcttcataattacacttggggcacagtacagattgaagtgctatgtaccatagttgccaaatgaatgctatgctcatgcattcccttgctttgtatcatgtgaccatggtggatggaatgagaattgggcagtaggccaaaaaggaaatttaagcaaggctttcttctggtttccctgttgggaatctgtgtcaatgttgccctgtggctgaagactctctcagatgtgggtttgtgagggatggaataacggtgttaaaatttggatgtgtatgagtagttgaactaagaatttgttgatatagagttgtaggtcaatgttttggtgaaactaatggttttagaaagctggactataaggctgtctgtttgatttcgttcactactaaaacaatgttaaatcctgagagctaagatgcagatatctgctttatagatatttcccattgagctaaaagggttccattaagcatgctatttttcaagagttcattaaataatttgatgttctgtttaatgcaaatagaccatgcaataccaatacactaagatgatccaagttgcctaaatataatgtgaaaaggacacttcccctactggaggatatatggagtaagggtgtgaataacttagttatagaaaatgttgttaagtagttacctatgtctggatccattttgcactatgttctatattttagttacttttcatgtgaaatgatcataataaagcctgtactatccccagataagatttttaaaattgattagattagctagtggctggaaaacacactaaagtccaagcagagtctaagaggctgtaccagccttagtgtctctgaagcatctccctcacacagagcagagatttttgaaagagagtttggaaacatgaaaataggaacaagatggtaattcttaattgaaaacttcatttctaagcctagaaacttaaaggtggaatgtatataggaatttggttcctttcttgtcattgactgtcactagttggtcagtatttgatctgcattcaaaacatgtatatgtcttgtatagaaacctacacatgcacacatccaggtggatagatagatagacaagagagaaagagaaagagaaagagagaggggggatttctaggacacagtaaaaatctaaccataaacacacaatctatatgggcattgttgatgtaaagtgctagaaacagaattcttttttatgatatcattcttttttaaaatttatttatattttatgcataaattctctgcatgaatacctgcatgacagaagagggcatcagctcctattatagatggtagtgatccaccatgtggctgctgggaattgaactcaggacctctggaagaacagcttattctcttaactgctgaactatctctctagcccagaaacagaattctttaagaattctgagaaatcgatttaagaacttacaaatactttttgtgttttttgttattgtgtaaatgaatctcctagaaaattggtagctgacaaatgaccttttgactatgattctattagtaagccatcatgacaggttctagaagggactgctcattattcattcacatggggtccattgaggcagcacagcaggacttcataatccaaggtgaccttgctctccaagtgggattcatttttgtttactggggtctgttagttcccctttggctctttttcctacatggtttctcatgtcactgttctatcatgtagattcctctacagcataacagaggatctttacatgtcatattaattctaagagggcaaagtggaagccttaaaatctcttaaaacctggacctagaaagaaccaacagcagttattgtcacctcctgacttgccatcagaggaaaataaactctattaatctgttcggttgagatagtcaatgaggtggctcaatagatcttttctgctacaatgctaaataaaggctggcgtgtctggggattgaggcattcttctccacatgatctttgttgttctgcatcaaacccagagacatttctttggcagcgaggaacattagtgtcagtattgctgttaggtaggaaaggtgagaactgttgctactttgcttatcttgttttggtttaacccactcttaattaagttaaacagaaaatctccattgcactgagcattaaaattctttctaggtgagttaggtggaaagagagatgacattgtgaattttaaaaaggtgccactgagaaagaaattgcacaggacacagagtcaggtggcaacagtaagcattatctttaatgacagccctccaaggaattggaaaggaaaaggacaggcaaagctaatgaattattatcataaactttccacttgatacccatttgaagagcatccatctagcaccagtttgatcataggattctaataatacaatcttcctcaaacttcctagctcagcataggaaggaactatacctttggttcaagtacttgctagataaatcacatcttagtctgactgcatgtttctgatagacttaaattagcagatgtgtattgaaaatcaaaagacagaaattaaccactgctatggcctgagccccctaactgattcccaagcttctgaaattggaaaggactacttactatacaattatcagagaattgatcctagaacacaaactacttaagaagccacacagcagcaagtcataaggaaatgtctctcttccttgttttgacaaacacactcaacctttagacattataaaacaacatcaccatttgcaaagttcacacttaagcatgatacaatcaggtaacaacaacaacaaaaatcacaaactcaaaatgtttgaaggaagtttactgttgtgtgttgaactgtatcatagctattctggggtgcatttttctgatctgttgcatagtataagatgaaggagaagactaatgttactgataaagacagaacagaaggtcccagcttgaactttgtttttccttattttccttctccattttccacacccttcttgtaggaatcagtaacatttattatttttcttcaggaagatggatgtgggttgtccagtgtagtgtaaatttatccttaaaacccaaacccttgaagtccctgtgttccaggctggggagtaaactcaaaggcaagatcatctactaagaaacagtgctgggagatgagctgaaaagaccactgacatcttgggatatgtcaaagaaaggcacttcacattgacaagttgtttctgtgggcgcccttgtgattaccttgaccctcaccctggcttgtacaatctgtcctctttctcttcaaatgaattcctagagctcggcccagcaattggctgtagatctctgcatttgtttccatcagttactagatgaaggctctctgatgacaataagggtagtcatcaatctgattacaggagatggccagttctggcaggctctccactagtgctaggagtcttagctgggatcatccttgtggattcctgggagtttccctggcatcacatttttccttaaccccaaaatggtcccattccccctatcaagacttatctttcattacttttcccttccatcccacctgcaacctgtccaaccagattcctcatgctcccacaaccccatggtcatatgacttttgcctttgagtcaattagagtagtttagcacactcactggcttgcaaatgttgaaccatccctgcacatttcaggaagaaagcaaacttggtcatggtgggaaaccagtttgatgtatatctgattctatttacaaatattttattgaacatatgtgagtctatattcatcagggatattggtctgtggctagctatctagatttctttcctccctcctctctctctctctctctctctctctctctctctctctctctctgtctgtcacacacacacacacacacacacacacacacacacacacacacacacacacacacactccctccctctctcgtgtctttacctggtcttcgtgggttaaaatgatactgacttcctagaaggggtttggtagtgctccttctgtttctatttatttgaatatcttaagaagtcttggctctagattgtctttgaaagtctggtagaattatgctatgaatccatctggccctggacttattctttttaagtggaaggctttttattactagttcaatctcctaatttgttaggagtctgtttatgttgttgaattcttcttggtttgtttttggttgtttgagtaaatctagaaattcatctatttcttttctgttttttcagtttaatttcaaaagttttcctttgtagtaatctaaatttatttggtgtctttcatactattttcttgtttatttctgactcaatttgtgtattctctttttttctttagattaattgggccaagggtgtgtcaatcttgtttatattccaaaagaactagttcttagatttgttcattctgtgtattgttttctttgtttctgtttcattgatttctgttctgatttttattatttttttgtcactgaatgaattttgttttggtttgtttttgtttttccaactttttggcttacatcattaagccacttagttgttctagtcatgtttcttttttttaatgtaggcacttagagctataaattttccttgtaagattgctttcatttgtgtcccagaagtttaattgtgtttttatatagctccatgaaacaaattctctctctctctctctctctctctctctctctctctctctctctcttcctttctttgttttcttctttgatccatttatcaatagtgaactgtttacctggagataattttttgagatagcaataaaattttcaactgatgaaaaaaatagtgacttgtttaatctacattagtttgtgtatttactagagttttgtttgctgtcaattttaagttttattacattgtaggcagatgtaatacaagaagttatttcaatgtttttgaatttgtaaatattttgttgtcatttgacagaatgtggtctattttagaaaaagcttatttgtactgctcaatagaatatatattctttggtgttttggtggactattctatagatttctgttaattccattcgctgttcgatgtcaattgaatctgattttcccctgcttactttttatacagatgaactgtctattagagaaggtgttgtataggaattacctgtaattaatggattgatgttgttctgtgtcttttaatcctgtagtacatttttaaaaaaaataaaattgggaccagagtttggggtataaatggttagagcaggaatcttattgattaactgttatcttgattagaatgaagtgtctttctttatctcacctgattagttatattttgtagtctattttgtctgatgtttggaaagcaatgcctgctttcttcctggtcctatttgattggagtatttttatccatccttttattcaagggggttgactatctttaaaaataagatgtgtttcttatagaaagaagatgatagacagattttgcatttatgtctataccttttggttggagaattgagaccattagtatttaaagtttttattgaaatgtgtcaattgtggccattgtgctgatttttgatgatggtgtttatgttcttgggtttatttttgttttgttttagcaatcatggcttttcattttttcctgtagtttctgtgatgctcatttctctcttcaacctgaaatactgctatctgtattttatttaagtgtgatttattgaatatacattattttagtatgtttttctctcttcttaaattatgtcacatagtttttctgtatatatgagtctaggctggctgtcatagttttttaggacttgggatatattgctataaatattctggctttcaaattttctgttgagaaattatctctcattctgatgatttttctttatatgtgacttttattatttttctcttgtagcttttaacacactttgctatgtatgcttagtgatttaactataatatgctgtgtggattttcatttttgatactacttggtgttgtgcttcgtgtaactgtatgggtaggtctttccttagtttgggaaagttttcttctatgaacttgttgaagaacttgtttatggcattttattgggggtgattcttttccttcagctaggcttataatttgatagtttttttccccatggtgttcaatatttcctgtgtgtccttttcctgcctttgttttttgaattccctgcttattggtatagatatttatctttgactctcaagttttgggttgtcttcatttgcatcagccttatttttatgttttcttgggcatcaccaaggcatttattttttcttcttaatttcattgaactgtttctttgtgtcttctttaaatttcttgaattctttgataaactttatgactatacttttaacttctgaatcttgaagttgttctgtgtaattctcactggcaaacatttcatctacaggactagtaagttttggagaaaagatattggctttatcttttacattgtaattttgcagtgaaatctgggcatatgtggttcttctgttaatcctaagtctgatgcaggcagagcaaattggggcagaaaagaagatgtgcatacaggttgggtctagtagagatagagtttttgttctgccaggtctcacagttgtttagtcccaaataaacacacagaggctatttggctgatggttcaagcttcttattggctatctatctcttaattattaaccaataactattaaactaagtatttccacttggtcttggcttaccagagaatgctgaggcatcctaccttcccagtggctacatggcgactctttggcggcacccctctgccttcctctccccagaattctcctcatctggaagccctgactatatttcctgccatgctactggaaaattagtgttttattcatcaaccaataacagaaacatatatacagaaggacaccccccatcagactagtggttggaaatggctagggtagaatgaagtcaggtagacagaagggtctgggcttgtatacagcatatgcttcctggtgaaggtctggagggtggatgtgaatatggcaaggtgtaaaggttttatgtgtcctcagaatggcctatggtttgggggtaggtagtgtcctagcagaagcctggagatcggttgaggctcaggcagaagtagctaagcctaggctggggcactggatctagggaccagagctagaccaggacagttggcgagaaggtatgtgtagtagggtcaggtatacttatcagtctagaacttgaagaagaatgtgtgatatctgattgggtggagaggttggttgaagtgcagaactaacctacttgtcacggcagaagccaagaggatatgttgtgatacagaactggcagaaacatgggatgtgggacccagggtggctctcctgtgttagggagaaggcatgaataggtagtatcattgaaactcaatgagctagactctggaggaagcattttaatttttaagttaacatacaaagtaatggacttcattgtggcattttaatacatatttgtcattttaagttatttgttgtcccaaccacctgtgattgcttccttcttccaccaaattagtcttttctactttcaggttatacatatgccataaccttctctctcagttctttaagatctcttcttttctttcagttgttcttcggctcttctgccccacataaatttagatgctgcacacaaaggaaaacatgcaatatatccaagtctgtttttttatttagcgtaatgacctatagttgcatagttttaaagtaaatgtcttgatttcattttcatttgtggatgaacaaaatactactgtgtatatgtcccatgtttatctattcatctgttgatggatatctaggttggctcaatttcctagctattatgaatacaatagcaataaacatggttgtgaaaatgccctttttatgtgacttagaacctttctacctttctgtgtatgccaggaattgtataactggatgcccccttttaatttttggagattcttttacactgatttccatagtgtctgcactagtttatattcttatgaacaataaataatgattcctctttctcacatcctcactgtcatttgttttcttgatatagatatattgactgggatgaaatggaattttaaaggatttttgatttgcattctcttctcatagttaaaatgctgaacactttctaatatttattgatcatttgagttacttctttttagatctgtctattctgctcattagactactaatttattggtgcttttattctttttggtgattaatttcatcatttctttatatattctggctattaacttccaagtctgaagtatggttgataaagattattttctactctctaggtggtccctgcactctgcttgtttctttttctgtgcggaaaccctgtatgaaatcccatttgtcagatcatgctattgtttgctgagctattggagatttttttcagaagtctttgcatatccctgtatcttaaagaattttcctttgggaagtttcaaagcttgcgttttgcattgtttttttttttttttgtgcgaggtagaaaatgtggatcttgttttattcttccatgtatagatacctggttttatcagtacaatttgttgaaaaagccttctcccctaattcatatatattactgagatcattgttgaaagttaggtggctgcagctgtgtgggtttatttatttacctttttctctgttctgctggtctacacatctgtgtgggtgccactacaattctgtgtgtgctattttcagtgtgtagcaaatttgaggtgagttattgtgctatctccagtattgctccttctacttagggcaggcttggctattggtatcttttatacctccatttggattttaggactgttttctgtagctctgtgaagaatgtaattagaaactttctggggattgcctcaaagactctgtaggtcatgttttataatacggttattttttacaatattaattctgtcaatctatgcacatggtagatatctccatcttttgtgtgttcttcaatttctttctttagtgttctggtgtttttattgtaaaggtctttcaactcgctggatagatttattttgaagcattttaaaaattcttgtgggtggcatttttcttctgatttctttctcaggaaacctcagcaaaaacaaaacaaaaaaactttctcttttatttctgtacagaacagtttctgagttttatgtgttcattttgtattctgttgttttgttgaatgtgttgatcaggtgtaacagttttctggtggagtatttagaatgttttaactgtagaacatgacatttgcaaatgggaaaacttcaacttctcttttgtactgcttttgtatgtcttcttatgctatagtccaattaagatttagagcagggatagggaattgtatgctctgactctaatttgtttctctaattcataaatttttagtggaaagttttatgtatttaaaattaatttgtgtctctttaaagataatggggcatgttaataagttgtatagacagttatggtcctaaaatattacttaaattacatttatttatttatttatttatttatatagtatttctttctgtgtagccctggctgtcctggaatttgctctctagaccacgctggccttgatcctcctgtctgtgtctcctgagtcctgggattaaaggtgtatgccaccactatctgggaccgtgtttttaaatcaacaaaccatttgtcataacaaattctctcagattaaaaatactgacaaaagggctgcagcaaatgctaaagagttgcctagatcttgctgctctaagacattgctgttgccgccactgtctgtccctctgaagtgtgaacacctgtcatcagtagatgctagtattagatctgagttgtaagactagaggagcaaacttggttgttctgtgctttaatcattttcctactactttttagtcctccttatgggcagataatctgcaaacttcagtgtctcataagtttccaagttgttcattagtacacctataagagaaaaacattctataactaaagagacacagaaatgacatataacacctctagtatagtcttggaaatttactgggcatgtgctatatttaagctctgataaatgttacaataaaaaatacacaaattttaaaaatctctctgtcctaccaaaatgtctttggttacagtgcttttatttcttttctccttatatgtttaatttttttccttagaacaccaacttaggtaatgttatgctgtaagatttctaaatttttaaaccctatgtcctacaattactgcaactccccaaactcagaagaaaactctggaaacttgactttcagaattatgtagacatatctttaattcaatgcaatcaggaaataaggtgaaaattttctcttatggccaattaaaaacaaaatgatcaaacctacaagattcgcttatagaaaacatgcagaagcataggagtacataagactgagaagaaaactctttttcctatttgtagtgtttgatttccatctttggtatgctgcatgatgagtatgttatcatcttgctttagaccagagaatagtcactgaaaatcaaatgtcagagacagcttcacaagaacaaaggctcatgggaaatgaatgccatctttctgcctgtgttatggtagaactgtgatggggcttctggaatagacactgtcaagcagactaaggttcttcttgtatatagtgctgacactcttggtttttattccttcaacaagaaattaatgaaccatgtctatgtatcaggctctaggacagaactacagaaataagtatgagaaagacgtggtccaaacaccttgtatgctatcataaaaaatcaagggcctattcaaaggctaagaagagaaaattgaagagaaggacccccctccaaaaattggatgatcctaggatttaagacaccagggtcctagaggatgtttaacccatcccttgttcagatgagtgcaccaaaggccaaaagcgcatagctggtttgtagctgaaatgtgccttggaatcacagatttgcttggaactcattttgtttcccactgtcacattacttgaggccctgtgatttctttctatatgacataatgtgaaatgagtagaccattcattgtggttataagatggttttcagtgatatttattttaataagctttgaaatataacccagtatgcatcactgtgaagaatcctttacattagaggattcaattcaattcaacctgtgtgtagaggaaatgactgaagatacaggagggtggaagattgagctgaatctcaggatatatgaaaatgagagtggggagggagaaagacatcaagatagatcaagcatttcatttatagtgactgcaagaatgttgatacaattggcagctgcagggtggcttgtggaataggggagcaatgttgatgtctaagaaggaaggaggaggcatggactaggatgtataaatttaagaagcactaggtgaaaggaagtctctgaagaagaatggatcgcaacagacattggggaagaggaaagaacatggggccttctgcagagatggagatctgtgaagattttgtaacaaaaggaaattttgttgcaaattataaataatcataaatatttaggtttagaacagtggttctcaatattacttattctgagacccttttaatacacatcctcatgtgtggaaaccctaaccatagaattatttcatttctacttcataactgtaatgttgttactgttatgaatcataatgtaaatatctgtgctttctgatggtctcaggtgacccctgtgaaaggggcatttgacccccaaaagggtcatgacccacaggtgattaacacctggttagaatgaatataggtagtaactaactgaaattttttttgcctctataaataatatgttttaggctgaaataatgggtaatttagcttttgtttcttgtatttttaaataacttctcttgataaaatatttagatatgtaatgcttatttccttagtaaaacatcccacatggacaaccctgtctttccacttctactcattcaatttcttcagtgtaagttgggaatagagaacaattaagacattatctccacttatctccctaatgtcatgtgtggaagaacctctcttctcagaactaaatcttctatgaacattacacaaacttcaataatactattttgctggtcctgttcttactttgtctattattgtgtgtgtgtgtgtgtgtgctgtgtcagcgctaggggacaatgtaagccacgcctgctagaagctggctacaggtgctcctgaccatgcccagcagggcgtggtcaaggtgaggtcagagtgatgttgatagagtttaaagggacagacaaggcacatgggggggcggggcttctctctggcctccctgccttgctgtccctggcatgatctggcttgtgtttggctggcatttatccaacaaaatatatcttaacctcgcagattatgcatttctcttaatagtgtcagtgtgagcatgtgtgtttatgaatgtaggagtgcatgtgcatacaacacatgaggtgctcatttggtgttagtcctagacttctcttgtttgagacagtcctagttgttcaggacttgtttcagacagtatcaggctagatggccagcaagcttctgtggactttcctgtctctgcctctcatcctgccccagctgaacacagggctctagggactaagtgctttttacatggaaccatctccctgccctgccatatatggattaactgagggtaaaggatagcttctcaaaagttaactggtatgtgtcatatgaagtttccaattaatttctcaacagtgagtggttgcaccttctttgccgaaatctgccagttgcttggaagaccattcaaaaaaacttcctgaagcactcaggctgcctccccagatctgctgttaccagctctattactgccattttgtggtgatttgggttcacaaaaatgagcaatggagaagatttgacagttttataaagccttcaacttagaattgctgttttaaactacaatgaagtggttggtctattgataagttagataggtattcctatttttgatattttttacttctttccttttgtgtaatagcaactctttggggtccttcactatggagatgtaacatgtcttgtcaagggaaactaaaaaagtgtcaactatcttatttgacatcaattttaattcttcttgaaaaggatcaatgacttcctattaaagagttaaaatgcttgtgtttccacctccatcttgcttcaaatttccactccatgtcctctcaatcctttttttctcccaccaaactttccccgtgggtaccttcttcacgtcttcaaacacactcttaaaaacttgcctttcttccatttgtataaaaggatggatgcaccaaagtaaactcttagtaccttgtactttaagtaaagaaacattttatattgtgaatgagaacaagtgatttaaggattcatttgctggcttgattccataaagatatatatttccatgtgtttgtttgtgctactgcttatttttgaaagagcagaaaactgctataaatactggtttaaaacagtggtgtgagtgggggaaacagttaatggactagaagattgaagggagttagattaagttgggaactatttatggtgtcacaagctttattacctgggtgtattatgtcctttcaaggatgcgttaacctgaaatgttttttacaacagtatttcccaaggtgtagttagaggcctgcattcagaaattcctttctgttttaaatttcagattcttaggtctcactaagtcagattaaatgcagtgccaaatagggacagcattagagtctctgttttaggtgtggatcccaggttgttttcctcaattaaaacatttgagaagctctggtttataccctgggagtaaagcatttatattctcacccagatttccttcttcaaattcagaatctcttcacaaaagtaggttctggaatactttgaatttcatcttttgcgtgtcttgccaaccaaaagcgcaggagccattgtagactctactccctccctcaaccagcactccacttaccgctaagtgctcttatgtcaagcttcttagaattcttaagtctatctcgtcctctccatctccaccttttctaacacatcaaatgataatggcttttcatctgtaaagtgatgagacattgcagaatatatcatccccccctttatgagcctttcacaatgataggagaaggaggaacagtggggctgctgttctgccagatgtgcaagcaagaagtctttctgttatttgtagaaaagtgaaaagcaataataaaatgcttgatccattttaattatcactgttgaaaacattagcaataaaatactcattgctgcagaactgttcctatagctcctgcctaccctacaactttgtacatatttctatcatcacatataccactttatataattgtttgcatatttgtccatcaccataaattataagctcttggttgatctctcagatgtcagcaagaaggatctttttgcgttacagaagtttaatgttaatatatataaattttatgttttggaataagtttttagaattatatacaagataaaattgataaataggagagataaaattatgagattagttgtgtgtatatgatattcatttctaccaaattctccagaaattggagaaacattttacaaatgtaatcatagactgcttaagaaaaacaagaagatgtcattttgtatgttgcgtgtggtgcatgagtgtgtgtgtgtgtgtgtgtgtgtgtgtgtgtgtgtgtgtgtgatactgagtgtagaatccactctaccaatgagctgtcctctgagctaagtaattgaaagactaactcattgaaaaaaatcaaataggtgtgactaaccagaaaaaaccactcccctaatacttaccagagagcatattaaggcacacacacacacacacacacacacacacacacacacacacacacacacacacacacacacactccacacaccagatgaatttagaatgtcagattcaaaatgaagaaagacacacacacttgtatagtaaactattgtacaagaatatttctgtaaactgtcaaatattatgtgacttgctgtcctaagattataatgtgtagaaagtcctcttttttaattaggtcatagctatagaaacatcagaatatagcacacggctttgtgctacacaaagctggtgaatacatttacaatgttaagtacagaaaagtatttgcttgtaattatggatcacatatactctctggtaatgattataaacaactcttggttatacacattctatactgtactatactcataaatgtaattttagtgtatgtcttctacttaggtaaaatgaactgtggaagtacttcaagaaagtccttcaggaaggatgtcaggagaaggtatctctatccatgtgactgttctagaagcccttctggtgggacaagatattgaagacagtgatatctatgattctgactttgtcaaggaacaatctaatgtatatctttatatcttattttttccaagaagttaaaattaaaagtagtaaaaaccttataggttgaaaatattttcatacatctctacaatgtatttgtattttaagctacattattacagaaaagccaaccagttaaaaaacttacaagtttataaaataactaagttatagtaatcttaattattactgaagaaagaaataatgtagatgcaacatatctttttaaatttttttattcatgcaatatatcccaacctcaattccccctccccttcccactcttcctagtaccctgccagcctcccctctcccccatatccactccttcactgtttaccttcagaaaagagttgaccttccagtgatatcaactgaacatagcataacaagttacaataagagtaggcacaacccctcatatcaagtctgggcaaagcaacacagtaaggaagaaaagagtcctaagagcaggcaaaagactcagagattccctcccccattcccatggttagaaggcctctaagaacatcaagctgaacatctatagcatagagatgtagcatattttaagtgtctctcaagtctacagcagtataggtgaatgcacttggcttcaggtccattcattgcctcactgaaacttcccagagacactgccactcccgaaagggcccttcagaagtgccctatacaggcatactatttttcatctctatatcgtattagactgcacttttcctatagtagatatccaacatagtgcaaacttatacataaatggctatacattacttacacatagtaatgaactgctgactacttaggtttatgtgggaccactccacatggctcattcagtgacaaagtcacctaaaaacagacttgtgggaacttgccattaacacatgagtgtatttaaacaaagcccctaaccactaagccaccaaccaatcctataccaacctgtcaactttgtgtttaaatccaacaatcagcccccagactaaactcccctttctgaaattcacccaatcttgcttaaaaggagcctgtgagcttctcttggggtcgccattttgccaagcctgcatgcaggtatttttgttatcaaattaaacattcttgttgactgtatacgtgactggtagtctttttgtgggacttctcgaggatcctaaccgtcatggtatctcttcccagctatgaaaaccctaactaaaacaaacattcacgagcccttttccttctggatcctgtaacccctctccagtcctggaatcctgctccagttgaactgtcccatgaaggttgatcctctgcagacaaattaggttagttgctccattccaacatcttattgtttctttctaaccttgcaagccttataacacaataagtagcccagccaaatgatgatcaggtgagctagcacctcacccagaggcccctttcttggtccattcttccttaaatagttcattcattccacttgctgctcccaggcactggcccagtgagctgaaaagttaacaaaatacaaccaacaacctgaatccaggtctcattggaaaaaaacccacaattattaataataatgataaataataataataataatgaaaccattatatcctcttgtcctagagcagtaattttttagtaatataggaattataggcttcgaagaagaaaaatcacaggtaaaggcataaaaagtaatttcaatcaagccataaaagataatttcccaaatcttgaggcagagatgttcatacaggtacaagaggcctacagaacactatgacccattatagttaaataccaaaaacagacaaaagagagaatattgaaagctgaaagagagaggagccaagtcgttatagaagcaagaccatcagaataagagtggatttattgaaagaaactttgaaagccagcgggttttggaaggatgtattcaaagatttgaaagattcaactgccaattccaggatattatacataccaaaactatcttattaagtaaaggggaaataaacagtttctagaataaaaacaaattaaagcaatctgtgactactaagtcagctctacaaagaatactggaaagaatactttgaataaaatacccaaaaggccatatggaaaaaaaatataccagaaagtcattgaaattgcagaaattaataaatatttaagtattagctctggctttaatggtctcaggtttccaatgaagaagacacaagttaacagattggatcagaaaatgggagccattttttgctgctccaagaaataaataccaccataaaggatagacactgtctttgaaccaacagaaggaaaaggatattccaaccaaatggaactaggaaacaagctggcacaactattctagtatttggcaaaatatactttaaaccaaaactgatcggaggaggtaaagaaggttctttagagagactagttgtggtggcgaatacctttaatcttagcagtgaggagtcactgctaggtggatttctgtgattctaaggcaaaccttgtatgcacagagagttccaggccagccacagttacatggttaaaccctatctcaaagagaaaaggatatatataacaatatatggagcaacttgaggaatattggctttagcactttgaaagtttggtagagtagtgtgctacaccacccaaccctggacttttttcatttgggagaattttaattactactgccatctctctagttgttatagttctatttaaattgcttatctgatcttggtttaactttggtaggtggcacgcatagagaaaattatccatttcttttagattttccaatttagtggagtacaagtttttaatgtacatccttatgattctctagatttctttggtgtctgttgacatgtgccccctttttgtctctgattttgttattttgggttttatctctgtcttttgttaatttggctaagggttttccatcttatttattttctcaaagagccaactctttgtttcactgatactttgtattgatttttgtttgtttctattttattgatttcatctccaggtttgattattttcgtgtgccttgtgcttttggattttttttttctttttgttctagacctttcaggaatgatgttaagttgctggtatgagatctcttcaatattattttttatgtagtcactcagtgctatgagaattgcctttattgtgttatatatgttggggcatgttgctttttcattttcactcaattgtagaaagtctttaatttctttcttaatttctgtcttgacccatttttcattcagcagagagctgttcagtttccatgggttgcaaactctctgttgtttctgctttgtttctatcaagttttaatccatggtgatcagataggatgtgagggtgttatttcaattttcatgtatctggtgagacagttttgtgtccaagtttgccatcaattttggaggaagttccatgagcttttgagaaagaagtgtattcttttgagtttggtgaaatattctctaaatatgataggatcatttagtttataatgtctgttagctccaacatttctctgtttagcttttgtctagatgacctttctattggtgagggtgaagtatggaagtctcccactatcggtctgtgagggacaatatgtaatttaagctggaatagtgtttcttctatgagtttggtgttcttgtgtttggtgaatgcatgttaagaattggaaagtcctttgggtgggtttttcctttgataagtatgtagtgtcctcttctatgtcttctgattagttttggtttgaattctgttttgtcagcttgctcttaggcctatttgctaaaaatttctttcccatccttttatcatgaggggaagtctacccatgacttcaatgtatttttttttttttttttttgtatgcagcagaaggatggatcttgtcttcacatccattttgttagtctgtctttttattgggggaattgagaccgttaaagttgacagatatcaatgaacagtgtttgttgattcattgtggggtgtgtgtgtgtgtgtgtgtgtgtgtgtgtgtgtgtgtgtgtgtgtgtgtgtgcgcgtgtgcatgcctgcagacaatgcatttgtgtttcccccttttttgaattgctggtctgtgattattcattcttttgcgtttctttaggtgtggttaacctctttaggttgaaattttccttcttagcacctctgtgaacctgactttgtatatagatactgcttaaatttggtttcatcatgagatgtcttgttttctttatctatggtgattgaaggtttggctggatatagtagtctgagctggcatctgtggtcgcttagagtttgtagaacatttgttaaggccattttggcttttggagtcttcattgagaagtcaggtgtgataggtctgccttttatgatacttggtccttcccacttgtaattgttaatattctttccttgttctgtatgttagtggattttttttttttttggctccagtctatttggtgttctctatccttgtatgttgatatgtatcaccttctttaggatggggaattctcttctatgattttgctgaaaatattttttgtgcctttgatcctgggtttcttccactttctctattcgtatttttatttatttatttatttattttggtttttcaagacaggatttgtgtagctttggagcctatcctggcactcgctgtggagaccaggctggcctcggactcacagagatccgcctgcctctgcctcctgagtgctgggattaaaggcatgtgacaccaacacttggctattcttactattcttatatttagtattttcttagtgtctcagattttaatcagtttggattttctttattgattctacttctactttctggccttgaagtattttattcatttccttaaactgcttgatgcattttcttagatttttttttttgcagaatttattaatttccactttaaggagcttcttcatattcataaaggttattttaatgttcttgtcttatgattcacctatgttccattcctcgaggcttattgtactatacagttggtggttctagtatagacatattatcctggttattattaattgtgttttcacactaatatgatctcctagagatggaggaacagacaaaggggaggctgcagcacagggtccgctgtaaggctgtggattagactgaaggattgggtttgcaagagaatagagataggtcaagatctgcagttagcctgcctgcttcactgggcagtggggcctgtgggttccccgggaatgcccgctgttttgtatttatctttatttagtcttataaaataggtcagactatttttctgctatttatcaatagattctgttgttgtatatccttgccagtgtttgtttctgttaatgttttagattttagtctttcagataggtttatgtacccagcattttaactggagttgtttattggtgtgtgctatggcatttgagggatatgccattgcttcctacaaatgtattgggctacattccatagcttcctgagggcacaagctggctgagaacacctcaatcctctgagtatgtcatcttctgtttgctacccatgagcaacaacagtagagtggccattgcttcaacccacttttgttttttgtttttgtttgtttattgttgttgttgttgttttgttttgctttttccagatagggtttctctgtattgctttggaggttgtcctggaacttgctctgtagaccagactggcctggaactcacagagatccacctgcctctgcccctcccccacccccagtgctgggattaaagtcatgagccaccaattcccggggcttccttctactcacttttaaaatggggttactagtctcattgtacttgcattttgagagattgtgcaatttggataagagagtcttattagctatgtcttctggaaatattttctcccaatctttggcttgctttcatgtgtttcttgagagttctttctcattcccacattacaaagactccatttcgctggattctgacattctgttcttcatttcacatggtgtactatatgtaatgtgtcttttcctccctgtcgctatttcaagatttttctgacttctttgacttttatctgtttgaatttttatgtgtctagttgtgatattcttcatatttatcttactgtgagatgcctgagattcttgggaaaaatttagtgtgctttgtaattatttcttttaatacttttcccatatttttctcatttcttcttctgagacttcagttgtgaatgaattatgctgctagatgctggctcataggtgaaggaaactatattcattttatctgatgaattttcttccttttgttaaaatggataatttccattattttgtccttaagtgcattggcctcttcctggattttccgatatgctgtgtttcctctgcaagcgtttcattaagtataacacccctttgttctagatttcatttagttgtttttgggtgtttgttttcctgttgatatattctagttgctcatttgttaagatcacttttaaattcttatcataacttcttgttctctattctatattgttggtaatctctactgttaaaagactgtaaaaagtatcattttcagatatttttcattttcctacaacctaaaagttaatttcaaattaattgaaattaataacaaaagtttattgaactgcatatatatgtaaacatatgtatatatatatatatatttaataactgataatcatgtatcaataattattttgtaaaatatgccacttgtttttgattaagatataataatattgctcttaactaagatgtttcatgtattcagaaacatatggtgcagggcagatgacacaatattacaaacaacaacaacaagatgccctagtgtctaaatctcctgtagtcaggctctgacactttcattggagcatgttattacaaatgaccattatatttcacagcaactattgcatttccttctaaacttgtctttctgcttttgttattgcttcttgccatttagttttagctcagatgtgaagggatcattaaaaaatgttgaccaggtgatattacttctatttggaaactgcccatggctttcaatatctaaacacaaaagctatggtccagacagtaagcacaagctgaagactgacatcttacatgcttctattttaactctcttgcctctctcattactgcttgtctaccatgatactcagtatgctaggcatgttcttaccttgggaaaaaaaagtggggcagggtgcagagagccagagtatatagaatggcatctctcctggtgtacttgctacttgggtagcttcttctgggttatgtaatgctctagtttagtaatgatcagggtgaaggctaccgactgtgtcttttgattaatatagtggttttaattttgaggtcttcattcctttatgctgattgtttgctgttgtctcttctggcctccctttcttgaacactgtatcttgggaagagggctttactatatttaacttccttctttcctagaaatagacctgacttttgatttttttcttcttgtaattccaaatcctttctttggtaatctaaaccaattcttctcatccctagtctggcacctgctccatacacgttactttgtatcatgtggtataattcatgttacagtccaagtccatcaatgaagaatgaatacaaaatgtggtattactcatcagtaaaaaacaatggcatcttaaaatttgtaggcaaatggatttaactacaaaaaacacatcctgagtggggtaacccaaacccagaaagacaaacatggtatgtactcactggtaagtagatattagatgtaaagcaaagcataaccagcctacagtccacaaccccagagaagtcaggtaaaaatggagaccctaagagggacatacatggagggacctgggaagggaagacagttaagatctcctgggtaaactgggaggagggtagaatggaggggatgggggttaggaacatgagggatcaagaagactgagttggtggaagactggaggaggagagcaatgaaagagataccttgatagagggagccattatggggttagggagaaacctgtccctagaaaaattctcaggaatctacaaggatgagcccagctaagactcctagcgatagtggagagggtgtctgaataatccttcccctttaatcagattagtgactaccctaattgtcatcacagaatctacatctagtaactaatggaagcagataagcactggattgagctcctggagttcaggttaagagagggtggagggatcatatgaacaagcaaggggagtcaagagcatgaggaaaaccacagatatagctgctcccaacttgtgggagctcagggactaggaactaatagctggggaatctgcatgggactgaactagatcctctgaacatgggtgacagttatgtggcttgatacattgggggaaggtgtccctggcagtggcatcaggacctatcccagatgtatgaactggcttttttggagcccattgcctatggtgggataccatgctcagtcttgacacaggatagggagggtcttggtcctgcctcaacttggtatgccagactttgttgactctccaaggaaggccttaccccctatgaggagtggatgggttatggaagtgggggaggtggagaggcgggataaggggagggagggaaactggggttgatatgtaaaatgaaaaataatttttaaataaaatttaagaaaacaacaacaaaacaagcctacaccaagagttgctagcagatatcttcattgaaactaaaattcagttttgtgatatggattttgaatccaatggcatctgtgtattcttttcagtttataaatgtataattgtaaatcattttaagagaacacacagagcttggtggtaggagtgcacatctttaatcccagcactcaggaggcagaggtaggcagatctctttgagttctagaacagccaggtctatagagtgaacacagaatagaacagagaggaagggtagctatttggccaataccatagaagcagaaaactgttatctgtaggtgaacttcaaatatcctttccttctaaaatacacatgagtagaatgccaggcaagatactgacttttgcaatgttacaccttagtagaaaagacttcagtcattattttgaagctaatttctacccatctgggtgaatttcagagcccctttcaatattttaagaacatgtagtctgactagaaatagctagtggttacaatgtgcaaaaacgattttgattaactctggaacactgtcttagggtttgtattggtgtgaagaaacatcattgtccatggcaactcttataaaggaaaacatttaattgtgtttggtttatagcacagaggtttagtccattgtttttatagggggaagtatggtggcacacaggcagaggtggtgcttgagaggtagctgagaattctacatctagattggcaggcagcaggaagacagagtgacactgggcttggcttgagcttctgaaatctcaaagctcacccgtgacactcttcctccaaaaaggctgcacctactcctaaatgtcatacctcaataatgctactccctatgtgcctatgggggccattttcattcaaaccatcacacatactgtagccaaacttactaaggaagcatgtaacatgagtccatagtttaaatctgtgtctgtactaaactagattttgtttctgtgagttagcattccccataatttcctgaatgttttcaaaataagtaatgtatttagttgcttgtcattgtcacagactaaaccacagcttctcaatccctgggtggcaatgcatacccgattatgaagactgtgaaaaatttggcatcaatgaaagctttctgaaagtgcagtgaccaaaacttaattcaaaatcaaacatgtaatgagtctggggtgtttctagcagtacctgttggtgttgtgtgaattgacatcattgggtctgagtatatgagagcactttgcactgacaaatgataaatgacaccaacaaataccctcagcttacactccagacatctgtatgttttgaacactacccactgcatgtttttgcactacaaagttctctgttgttacagaagcataatggtttaattatggaaaacaacgaagttttgtttgtttttaaactgtaatttagttacatttctcccttgcttttcttccctccagatacccctccttaatttctttcaaagtcatagccttgaagtaattaattgttattctgtgcaagtaagtgtcaatatagtatgtatttggattgtatttgttagaattttcagttttaaaaaaaattgcggtttgagtctgtgacttgagtttcataaaaaaatccaatgtatttttgcttgaaacagaatatccagcagatctgaaagggttctgtgcatgcatactagtttgtagtatgtatttatgctaagtgacagtctttgtatgggcaataataatatcaaaatatcgatcaactctgtaaagccttgaagatgcaatatcaaatcttcagccagaatttaattctctagacagaaacaaagtagcccacctttattattagtataaaaatgtacttttatttttaagaaatggcaacattcgctcatattatttctcctccctcactttgacttgtaaacggagttcttaattcgtctaagtaacaaaaacatggagtcagatatagagggaaatgctgagagatcagagagaagaagcaagtcacaggcacaccttaccaccttagcatctcagcagacaagagagcaaattcctgtttctccttgcttatatcctgtttccacccagctatctcacttcctgtatgtacatacttccagacctctatggtttgctagtgataagctccattctctgatcctcagacaggctttatttgtacaagcaatatatcactatatatccctctttttgatttaaaattaaaaatggttataacgaatacaagaaaaactatgtataataagtataaccagtatatacaatatataaggcaataagtacattaacaatgtctagtccattagcatttggcaaattcagggaaaatactccatatttattctttttggatgagtccaaagtcttgtgcctaatttactttctattgtaatttgcattatcaaattatcttttaatgtctttcaaacctattatacttaacacatattaggaagaaaaagaattgcagattatcctttgagatttgaatatgatttgggggagagatgaacaattttataacaggtatctataaattttaagccataaaacttattattgctttgagagttgagaaatagcatacacaatggaaagtttgtaatgttatatagcttgatgaaatttcactatgaatattattttattaagtaaactgaaattaaaatgttactgtcacctaccatccatttattgtgacttcctagtcactatgtctgtaaataatcagcatcttagtatctattggaattattttttctgtttgtgaagctttgatagattaatactaatataatggttagttttaattgtctacttgacaaaatctacaatctcctgggaagaaagtctgaatgaagggttgtcttgatcagattgttctgtgggaatgtttattcgatgttatactgcttgtaataattgttgtgggaagacttagcttttatgagtgccactatccccagggttgtgtctcacagtgtaaaagtaaagaaggtaaggtaagcagtagaagcatgcatgcactcatttctctctgatctgtggctagctgttttaagttcatgtcttgatttcattgctgtgatggactataactgttactatcagccaccgtacatctttcacaaagtgctttctgtcagggcattttaccacagtaatagatatggagatagggtaagtatattttttttcaatgtctgcatttttccctatcatccatgactcctgcaacttgatctagcagtaagtttttatctagttacaataaacactatatcaaaacaacttatttgtttattctattgttgatgaactgcagagtttttttttactattgtgcatgcatcttttagtatccatgcatgagaagtttttaatttttcctacataattttagaaaaaaataaaagtaaaaaggatcatgttatctacaaacaagaaagatttgacttctttgtcatctgtgccttcaagttgtttatcttgccatattgctctccctcagacattgagcactgggctaagtaaacatgaagaaagtggatactctagtctcatttcaattttcagaaaatgctttcagtttttcccatttagtataacattggtcatgaatttgtcatacatagcctttattatgttgaggtatagtctttcttttttatttctttttttgttttggtttttggaaacagggtttctctgtgtagctttggagcctatcctggcactcattctggagaccagactggcctcgaactcacagagatccacctgcctctgcctcctgagtgctgggattaaaggcgtgcgtcaccaatgcccgggtcatatttcttttttctattttttaaaatttttttatttcattttacattccaaccacaattctcccttttacctctcctcccaccccttgcttcctcccaaccttccctgacttaccccctagcccatcctccactcctcctcattggtaagggctcccatgaggagtcaacacagtctggcacaataggttggctcaggaccaggctcctctcccatgaattaagactgagcatgctgtaccaccatggggattgggcttcaacaagctagatcatgtacagggataatatcgtggtcctactgccactgaacatggcatccaaccctaagaaatgggctccaacaagctagctcatgtttcaggtttgtattgtggtcctactgccaggggcccttcagatagtccaagcttcacaactgtctcctacatacagagggcctagttcagaccctggagtctccacagttgtaggtctagagttctgagtttcttcaagctctgtagaattctctatcatgatcttgacaccccttgctcatatattccctcctccctctcttctactggattcctggagcttggcctgtttcttagttgtggatctccatgtctggtggcatcagttactggatgaagactctatgatgatagttgtggtactcatcaatctggttacagtgcagtcaggactgttacacagtgaaaccctgtcttgagtgtgtttttttggtgtgcatgtatttgtgtagtttttggagtttttcttgctttttacatctagagttactgcattgtgatgagaaatgatatgagaaatcacatctttttgttggtaagacttaatttgtactttagaatattatctattttaggaagtttccatggttcactgagatgaatgtatattctgtaactgatggatggagtactttgtgtcttttctgttttttttttttttgggggggggtgttgagacagggtttcactgtatttgtttggaggttatcctggcagtcgctctgcagaccaggctggtctccagctcacagagatcagcctgagtctgcttcccaagagctgggattaaagacatttgccatcaccacctggctgttttttctgttttgaccatttgatttataatgtagtttatttgtgaggctcatttgtttggttttaatttggatgacctgtaggggtcagagtggggtattaaaatcattcaccttcattttatcaggaaatgcctgacatcttattttcattagttcttgttttatgacattggaatccccaacatttgcgtaaatgtatttataatttttatatcttttggtgcattattccctttattaacatgtagtagatatctggcttacctttagaaatggtcttcacttcctttcccacagcctggggattgtaacgctgagttgaatctccattaagctttttccatttccagttttctttcactcatccactttcaattattctgactgacagactaggccttacaagtcttctccccattactttttaaccattgtcatcttgtgttcttctatttttagggagatggttctcaagttaatcagaaaacaattcaagaaaaaaaaaagagttacaactgtgctgaattcttactatctcacttttctttctgattttctgttcttagttcctggatgctttggcactgtcagattccaccttctgtgttcccattctcaggagagtggtaaagtactctctgcctcttaggaactaccctttccccagctttctagctcatctcatgtcagggctcaacaaatgttctaggatctatccatgggaaaagttaagcttagttcaaggaacaccttctgcctatagtaatgtccatttgtccttcctgtcactgtagtatgttggtgcctacaaataggtgttttacatttgatgggcttcataagtttttcctatctggaaatatgaatatactgtaagttattagtatcaaggggcaagcagatttctcattggtaaattcctttttttttttctaaatcgctcttattcacatatccattcccccaatccctttcccccccattctcccatcctcccatcctcccatgctccccaccgtaccccaactgcactccccatgccctccccagagatagtgaggccctccacgggcatcttcaaagtccatcacatcatttggggggcagggcaggccttctttcctgtgtctgggccgcaatagtatccctccatagggaatgggctcccaaagtccatttgtgctctagggataaacagtggctccactgttagaggttccatagactgtattggactccctagctggcacacacattcctagggcttggttctgtccaatcctggttccccagcttttggactctcaacatatgccttataaatggttgctttctccctaataagattcttctgaaattgacttatttgtttgaatagaggaaaacattgtaagacgtctgtacttccaaacatgttataacttcataattttagaatttgtttttcttattttatagtcttcatctttaattgtgcgccaaaaggggatattttagaaagaaaacaatgtcaattcagcctgctgttttccatgtattcatgcgttgtaaatgtgacaaatatgtgtatgcatatatacagagaggaaccagacagcactgcagacttcagctctttcaataagtgcagtggagaagcagctgctgttctctgaagagaggagacaatatgcttgattttaattttaatttattttcgttcaattttatgcctttcaacacttccttatgctgtcattaaatcctcagttttataatttagcagtatattctctctaatgcatatattagttagcccattttctatagctactcatttacattcataatacttataattaggaaattgttagaaggctttttcaataggagtgatcttaaattgaaaattgtatgggaataagaagggacacactgacaggaggatgaaattagtcactcatcgaggacaataaaattattttccaaagtataaagtgattataaagttaatgtttggaaggcaagaaattaatattgttaaaaattttaggttctccaaatttaaaaatacttgagaaaactgaaattataacaaaaggcataataagggtcatcaattttttgttaataggtttcttggtcaccagagtaattattttgaaggcttctgaaaattataaaagattatgcaatatgaaaagaaagttttttattttaaatataattttttatcacatactattcagttctccactggaatttttcatttgatctgcatgttcatattaccttacatttctaatttattagcatcccttgaaggtatgtttctatagtttgtgatcttcagttctactgtcttgtcattatgtctgttcattttgattgggtgctggacattgtacacaaagaactgaaagggcaaatcaaacctgtttgtaaaatcttgtattcaaaattctatgttaatctggaaatcaaatgtcttgtttctggtttttgacaggtgaacttgaactagcccttagagttcaatattaatctaatcaggaattaagaatatcataagatagatttcagactcctggtcaacctttatcttttgggggtatatattctaattgagagcaaaaagttttcaagtgacctgttttatacactgacaaagacaaaattattatatattattattattattattattattatcaccaaagacctatgagggtctggttattcaactcaacagactgaattttgagtgtcctttgagaaactcatgggttctcgcagaagcaaagcaattccagatgttgaactcaaccttctggcttttgctcttattgctgttcttcctacccaccctcctcctctccactctctcctcctcactgtcttctttttccttcaccacagtcttcactgaaatgctagtcctttactgcttctgagaaatttttagtattttgtttgcttttcaagtagttttcatcaagagatttagcattaagaagcacctggtgtatgtagcgcattctatgaattattcaagttcaaataaaagcatttttttctgtcacacaaatatgtgaaattagttcatacaatacagtcttcatagtgacaacttagattctattatgttcatttattgcactgagttttaatttgataaataataaatattttaaaatgatttcttaaataatagtgaaataaattttaaaaaatcagtaacttcctcctatatcatttcttcctcaatccttgaaaatagtcaaggctcaatgtatatatctctgtacttagttttatgtgtaaatgcacaaaaacaaacagaaacacttaaaaaatcatgtaaatttaataactctccaaataaaatgtctaaggcctataaattatatacagcctcattaatctgtgtagacaaagaaatttagtaaaataaaggaaatttcaaatgctcttttacttttggggacatgatgtatctttggttgtttttattttctggttccagggataaaaattcttttcatatcccactctggagagagacgtgtgtatgaatgagcagaaatacaatgagctttaaggtctgtattatccaggcaaaatatgtttggtggatttaggttttgttagaagaaaccctatccactccctatccactctatactttaacatatgtatgatgcatatgtaaatataacatataattataataaaatggaattctccatcatctttttctgtgatatatatcacaaatttatatgtatttcatattatatatatgtatgcatatcacatacctgcacactttatgaagacaattggaattatatattataaatatgttatattctattgggtctgaaacatctttaaaacagcagcacttcttcatcttccaaaagagtttccacagtcaaagagaatataagtggcatgacatattagacgctactggcaccaggatgaggctatatgttgctaataatattatggaatgttttgtatttgacttgtattttgctgtgtacacacacacacacacacacacacacacacgtgtgtgtgtgtgtgtgtgtgtgtgtgtgtgtgtgtatgtatgttctcttatgtaataaaatttcctagtggattaggtgagtttttactatcggacagcagaggaaatcaagacaaaagagataatttatttgtctcagagccaggaaagcagagattgaggttttgtagtttggctctcagcttagttgtctcccagcaataacactgttctcttgtatcctcagatgtgttgcagttgtatcttcattttgcacgtgtagtttcctagtattttgcttctggattcttgttccactgtgtattaagctctacttcacagtgtgtttgaattatgttaggggaagtataccttaccacctgacccttggcttcaaatggaagaaactcacctgattaacatgaattgtgttctctctttatggtgtcttaaatttctcccaatctgaggctgctatttgaagagcagcttggttattctgtagaaatcctcctactggaaattatttccataaacatttgaccagttaagtagaaattccaattaaagtaagggatcagagaatctgagccatactatagtgcatatgtatctatatacagatatcttaacataaacgtatacttatgtcttacttagatattttgatttaatgggaaacatacattagtactttgccaatcagtatgtttttcttacgtgacatcaatcaaacatttttattacaatttttggaatttggcatgatcagataggtgattacattgtatctatagtttaatttcttcccatgatccactacatatactttccatgttgttttacttaaaggtaaggaagaatttaaagacagttgagagcagtttaatacatgatactttatgattttcttcctctcatttaattttacagcatttataaaagaccccttttaacttacaattcagcttagttttccatgaaatccagctttccattaatacaacaaagcccacgatgaagatgatcaactcataaggagaaatgatttattttgcacattgatttggtgtgttagtccaagcccagttgacctggttgtttctgtggcaaggcagcacatggggaagagaggaacctgcctcattgccagcatacaaaaagagaaagagaaaacaatctttgaggatgtgacttcggtgatgtaagcctcccactgtatttcttttctgaaagccttcactgacctgaataatggcctgtcattactacacaggcttgggggtgccctatattctaactgtagcaatggcaatttctaggaaatcgctttgtccattcaaagttaatctaagctagaagtagtagtatatattctcctgaactcaagaagctgaggcaggaggacagtgagtttgaggccagtctatgccatatcaaacccatatcaaaataaggtaacccctagactattctgatacatttgagagtaaacagagctgacccagtgtatagggggcaggtagaagaaggcttgagtaggtgtgctgcaggctagtatctggataccataactaagaaactcatggattgctgcccaaggaatctttgttaatggagtaagtcagttaaatagttttcttttgttgtggtgacaatagtctttcatccatggagtccctaaaactaaaataagggagatacttgatatcagaaaaatgttggacttaagttttgttatgtcattttgattttaagagctacaaaatagtattgagattttaaaaaatgcttctttatttagttgtttagaaaatgctaaagtggttgatgttatttatggagattactatagatttcacatttgccacttcaaagttctacctgggatatttctcagtggcagatcaaatgtttgtgtgacacactgggtttaattcacagaaatgaaacacacacacacacacacacacacacacaccaacctaaaacctatgacaaagtgttagttttctggctacccaagaaacttaatcatttattacacaagttttccttttatgttattttataactcaagggccatgtataaaataaaaagatctttttaaccaaaccaatgatctaaatttagcagtaaatctatgtttttacttatcataatgctttgtctggcggctgacatttccccatcaatcagctgcttgggattcacttagatatcacttaagcagactcacttccacttatctggagttcacttgaaaattctgagactatatagaaaattaaagtatttttttaatcaatgaaatcttatcaagctccaaataacttacaaagagttagagctctttgaaggctacacagtcctgaacttgagtcctttttcaacccattcgtgtctggaggcaaaaatgtaattatagtaacatacctttcctcaaattttctggtcccttatgtattaaaagagttggttctatttaaataagcacagagtcattggccattaatgtctttaaagaagtccatgaaaattatgatggcactttcaatgaaactcatggatacacattgaatcttacataaatatgagtcatgcattcaaacttgaagatcagtcaaaatgtaaatactaaaagccatgtttcttggtgcattggctcttttggttgttgttctgtgtggccaggacaacttccatagaaacatggtgttatgaaaatcagtgttctgcatgtgttaggagaaactcaactattttttgaaggcaacataagatctacacatttcttttatatgatgtcaaaaccaaaaccaaaaccaaatcaaaccaaacaagcaaatcagtgctgctatcatttctaagttcccggcttcatctgagtcatcttgttttattaattgaaaattttaatttattttacattgtgactgcagtttctcctccctcttctcctcctcttctcttcccaggtacctcctctatgccccccatccactcctccttaatctatgttcagaaaagggcaggcctctcatggacatcaatgaagcatggtacatcaaattgaggctagaccaaaagcccccctctgcatcaaggctgggctaggcaacacagcctggggaataggttcccaaatgccccctgaagtgccagggacatgtcctgatcacactgctaggagcctcaccaacagaccaagctacagaactgtcaacacatgcagagggcctaggttggtctcatgcaagttccctaactgtctgtctatagagtacaggaactcctatgagcccaggttagctgtttctgtgggttcctcagtcatgactctgatgcccctggctcttacaatccttcctccctctcttcaacaggaatcccagagattgctcagcccagtacctggttgtggatccatcagtgactggatgtaaggctctctgatgacaaattagggtggtcgccaatatgattacaggagatgtctagttcacgcatcctctccactagtgctaggagtcttaactccagtcatccttgcagattcctggtagttttcctggtaccaggtttcccctaacaccaaaatgatcctccctatcaagacatctctttcattactcttcctttctgtcctgcccccaaacctgtccagccagatgcctcatttcccactgttcccccttcctctacccccagtatacacaggatatctcttctagttcccttcccagggaaatccatgtgtccatctttgggtcctccttgttacctagtttctcttgggctgtggattcttatctacatcctagttatcctttacagttaatatacacttatgagtgaatgcataccatgtttgtctttctgggtctaggttacctcactcaggatgatttttttctagttctatccatttgcctgcaaattttatgatggcattgtttttcttttttcttttttttcagctgagtaatattctatcatgtaaattaacacatttttatccattctttggttgttttcagtttctttggttattatatgaatagtactactatgaacatagttatgaagtcaagaccaggctggataaacccacagaaacagctgacctgaacaagggggagctcatggaccccagactgatagctgggaaaccagcatagggctgatccagaaaccctgaaaagtggatgtcagttaggaggcctgggatatctatgggtcctctgataatggatcagtatttattcctagtatacaaatgcactttgagagcccattccacatagagggatactttttcagactagacacacaggggagggtctaggccctgcttcaaattatatgacagactttacagatcccccatggaaggcctcacccttcctggagcacagaaaggggatgggatggaggtaggtgggggacaggggaggaggggaggaagagggaactgggattgacatgtagaacaagctcatttctaattaaaaaataaaaaagagaagttcaattattctttacaaaatgatttgtgcagtagtgtggctttttgtctgataattctttcttttcctttggtttctaaatgctgataattttgctctcaaagcacaacagcattttcagtggcagagaatgcattaatctcagacaggacatcgtcttctgctatgaatacaacagttcctggcatttgtcttccaggcttgcagtctccagctcagcaccagactattagcagcatgctcttgggtgaatgtctaatctatggctacctccctgcttgactgcatgtactcacccaaacttccccaagcacactgtcaaattagtccccagaatcctgtgttcattgctgtgtgtccatccacagccaaattaaaacatggaacttttcttaggttgcttagtattaaaactactacagtgcatagctgtgttcaatatatgctaaaatgagtttacaattttaattggaatgtaataattgtatatatttacagaatagagttttatatttcaatatatatatatccaccatgttgctttctctagatctctgtgaactttctcggatgttggtaaatgtcacccattcttctacaaaatcaactattttaactttcacacttgagttagatcacatagtatttacctttctgtgcctggcttacttcacttaacataatactcttttggcttttctatggtcctgattcatgctaaacaccagggtttctttttatgatggaatcattttttactatatatgaataaaatactttcttcatctattcattcattaatggtcagtttgatttattttgttaattattgtttctgttgttaaccatgtgacaatgaacacatgagtacaggttgtctcttcaaactattactctccatccttttggacaagggtgagattgaaatgatatttccattttcagtgttttcaggatcatctttacaattttcccgttattatccggagtgagtgaagagacactcttaagtcagatacccatcattaaaaaaaaattatggtttgctatgtggtcagctcaaagcacttttcttcattgtactccactccctccccttctcctctcctttctcccaaggaggtttcaaattgtttctacaaatagatttcttacttctctattttaagccaggttttttatttcatttattcttattgttattattgcctactgttttgatttataactccatcttcatttagaatgagttcttgttggtgattacatgaggcttgcctactcagcagacatgttgggtatgtttaaacccagaggcaattgggcatgggttctgctcagtgtctcctcatccattatctcagtcactaagcatccaagaaggactctttaatgccatcagaggtcctgtgtaatcccaccagattccagacagacacttctctgctgttgcttggttataagtacatttttattttgcttcgtcttgactaacttgtgcatttgagagatcttaaccttaaagactaagaatttttctcaggacccaactccttatgagagagaaacagaattcaaagaaggccttatctataacaacatgctagtcccctgaaatacagatatggattaaaaattaaagcattttttagggaaatcttctggaaggcaggagacattatgtctattcccttgacttactctttcatttatcaggaagttagttacatgcaacttcttcagactgaaaaaaaatcaccattttttttttaccttttctctattttgttttatttaataattttaaaatttatttgtttattttaatcctgactgcagtttcccctccaccctctccttctattccctccccctatatctcctctgcctccttgtcccatccattcctcctctgtttatgttcagaaaggggcaggcctcccattggaatcaacaaagcatggcatatcaagttgcaaaaggactgagttcctctccttgtattaaggcaaggcaacacaatatgaggaataggttcccaaaagccagtcaaagcattagaaaggacagcacaagctcccactgctagaagtcccttaagtagaccaagctaaagaacagtcacccatatgttgaggacccagactggtcccatgcaggttccctggttgttggttcagtctctgtgagctcctatgaccacatgttagttgtttctgtgggttgacaccttctggcttgtacaatccttcctccctctgttcatcagtattccccaaagttgaccaaatgcttggctatgggtctctgcatctgtttctatcaggtactggatgaaggttctttgatgacaattagtaatcaatcatatagtgaattattcttaggcattatttttcctagatttttaaatttaaaatagaaagaatcttattctaaatatcaatcccaactccttttccctcccatccttccatgccccccaaaaactccccatcccatctcccttctgctccccagggagggtgaggccttccatagggcatcatcaaagtctgtaacatcatttgggacagggcctacgccctcccccaatgtttctaggctgagggagctctatgtggaatgggctcccaaagtccatttgtaaccgacctccacactcagggggcttggttcagtcctatgctggtttcacagctgtcagtctggggaccataagttcctccttgttcaggtcagctgcttctgttggtttcctcagcctggtcttaacccctctgctcatcactcctacatctctacaactggattccagaagttcagctcagggcttagctgtggatctctgcttctgtttccatcaactactgcatgaaggctctaggatgacatttaaggtagtcatcaatctcattataggaaagggcatttaaggtggcctctccacattgcttaaattgatggtgtcatccttgtgaatctctgtacaattccctagtgccagatttctctataaacctatattgtctccctctaataaggtatttcttttcttgttctgctctattcttccccttactcaatcttcctgttcccttatgtccttctccccttcctcttcttcccttctctatctcccaacttcctctctgttcccctagtgctcccaatttgcttgggagatcttgtctttttctccttctccaggggaccccgtatgtatctcttaggatcctccttttttttcctagcttctcttgttccagaggcatcaccatccctgacttcaagctctattatagagctatagtactgaaaacagcttggtattggcacaaaaatagacaggtagacaatggaatctaattgagaacccctatatagacccacacacctatgagcacctgggttttgacaacgaagctaaaattatacaatggaaaaaataaagcatcttcaacaaatggtgctggcataaactggatgcaaacatgttgaaggttacaaatagatccatatctattaccatgcataaaacttaagtccaagtggatcaaagacctcaacataaacccatccacactgaacctcttagaagagaaagtgggaggtatcctttaattagttggtacaggagactgattcctgagcataataccagtagcacagacactgagatcaacaattaataaatgggacctcctgaaactgagaagcttctgtaaggcaaaggacacagacaacaagacaaaacgacagcacacacaatgggaaaagatattcaccatccctacaatctgacagagggctgatttccaaaatatacaaagaactcaagaagcgagccaccaaaacaccaaataatccaattaaaaagtaaggtacagaactaaatagataattcccaatagaggaatctaaaatggctggaagacacttaagaaagtgggaaatgataatcaaaataactctgagaaaccatcttgctcctggaagaaaggctaaaataataaaataaaaaacaccaatgacagtttatgttggagaggataaggagaaaggggaacactcctccattgttggtgggagtgccaacttatacagccattttggaaatcagcatgatggttcctcaggaaaacaggaatcagtctacctcaagatccaccaattccactcttgggcatatgcccaaaggatgcacattcatataacaaggacatctgttcatctatgttcatagcaatattatttgtaatgaccagaacctggaagcaacctagatgccctttaactgaagaatagataaagaaaatgtggtatatttactttttcccctttttaaaaaatttaaattataaacaagcttgttttacatgtcaatcccagttcccgctccctcccctcctcccctgccccccaccaactccctatcccatcaggtttctgctccccagggagggtgaggccttccatgtctgatcttcaaagtctgtcatatcatttggagcagggcctagatgctcctccttgtgtttaggctgagagatattacacaatgcagtactactcagtggaaaaaaatggaatcttgaaatttaaaggcaaatggatggaagtagaagaaaccatcctgagtttggtaacccagtcacaaaaagacaaacatggtatgtattcactcatatatggatattagatatagagaaaaggattaccagcctacaattcttaggcattattacattgaaaatttcctccaatcatgtttgcttctatcctaggttgctggaccatccagcatctggctcctgcctgggactactggcaatgtcaggggggatcactcttgtggagttggggaggagtagtatagatactaagactgacaattaataaatgggacctcatgaaactgaaaagcttctctaaggcaaaggatacaatcaataggccaaaatggcagcctacagaatgggaaaagttcttcactaactccacatctgacagaggactgatctccaaatatatgaagaactccaaaaactagacatcaaaatatcaaaatgatccaagtaaatatggggatacagttctaaacaaagaattctcaacagaagaatctcaaatggatgagataaacttaaagtattgttcaacatccttagccatcagggaaatgcaactcaaaatgactctgagattccatcttatacctgtcagaatgcctaagatcaaaaacccaaatgacagctaatgctggacaggatgtggatcaagcagaacagccctccattgctggtgggagtgcaaacttgtagagccacttcagaaatcaatattgcattttctctgacaattgggaatcgatctactcaaaactcagctataccacttttgggcatatacctaaaagatactcaagcataccacaaggacacttgctcaatcatgttcatagcagctttactcataatagcctaaacctggaaacaatctagaatcccctcaacagaagaatggattaaaaagaaatgtggttcatttacacaatggatataactcaactgtccaaaacaatgacatcaggaaatttgaaggcaaatggatggggaaaaacccacaaagaatcatttagagtgaggtaatccagatccagaaagacaaacatggtttgtactcagttgtaagtggatattagctgtaaaatacagggtaagcatgctataatctacagtcccagagaagctaggttacaaggagggtcctatgggggatgcatggatttcacggggaattggaaataaaagaggtctcctgggtggagtggggttgtggatgggagtaaggggtgatggtgtgaacatgagggatggggtttcagggtggggtggatggatggggagagtacttattgctcctctgaggaccagacttcagcagcccagggattgagggggctccatggagtcagcaagctgatcactcaacttgacttttccatctgagggggtaaagcttaattctctggactggcgaggaggggacaacacaactccctggtgctggcaaaaacagagaaacacacacccatcttcaacatatcagaatctcacctagagtgctgatgaatgacaatcctttagcatttcagagaaactgaagaggagatgcagagcaaccaaactactggacagacaaacagacaaaagaggacttttctgaggaccaaagcttagttccttactttattattctttctgttgcttgttctattctattccttttctgttctgtttttataccttgatgtttcccttctatctttcttgatattttccttctacacctttcctggtattttcctcctttcttgtctttattttttcctttacagcttgtataccctagaaaaatctttcaagcattatagaaattacaatgttgttgcattctattttttcaagtgaattattacaatgaataaagtgaaaaatacatgttttccatatatcttgcatgattaaacatttcacatattacaggtgaaaaaacaagtcgtcccaagaacccacatacattcatacccaagcagcttgttatagattaacagagtgtaagcaagaaaggtatttttctcagtcagttcttttgctgacaggctgcattttgtggttacaaagaaaggatcaatcgctttattatttatcacaaatggtaatcttataaaaggtcttaaaagagtcacaaatctaaatttttgtatatgaaaaacaatcagttagctctactttaaatcctcagggtgcatacccactcatccacagttttttattagatcatgtccggaagctgagggcagaaattggtacaggaattaatcatcacctctgatcaccaacctttctagcaagagaggtatatcagccagcaatagccagactgtcattgttcttgcttcttgatctcaatgagtccctcactcaaccatgtgccttcctaaactttaagttgttttccaagattttctacctcaaagccattaacaaaaacatcttaacataaccttactaacaattctacatatctaaattctttctaagtgtggtagttgaatcattgatctacttcagaagcaaagcttggaaaaagtctatcactattaatgttaagtaccagtaagtactgcccagtgagggctagagactccctgaaagttttcatacaacccatagattatgagggatgtggaaacaatgaagataaccatcaaagctatgctcaataacagcgtgaggttcccagaacatgtagtccttggggctttgcctccccaaggcatactcagttaccacttagccaacctcccagctatgtgccatgaattccagtgctgcctcttggttcccttgcatggctcctgacaagaactgaaagagacaactgtaaaggtggcattccagtgtagaaacctggtacaagggaaactcctaggaatctacaaggatgatccctctaagactcttagtaatggtggatgcatagcctgaaatggtcatctcctgtgaccctgcaggactttcagtgaagggattaggacaccaaaccagccacacaacctttgacctacaagtctgtcctggctatgggaaaagcataggtggggtcggggtgttcatagtggagtttaagggtggagtggagattgtgggagtagccaaccaatgactggtctatcctcatccgtctctttagagctttcccagaaatttgttgttttgttttaagaaaattgcttagacatttctttttagctaatttgaaaattgtgtggcattcattgtagagggtcatccactattgcccagaggaactttctttgaagtgtggaaaatggaatctaagacatacttagcctagatctccatagatgcttctatctaggatgacaaaaaattggcgtgcatttcatgtccacaatggaccactatccagagacagaatagtagtttattttctaagcctgcctatcacactcaagttatgcctataatgagctcaaagcttctggtcttcattgccctctaataagaaatgaaaacatctaatgcttctgtacaaatacttttagaaacctccccatactcttattaacattaaaaatagctactaaaatatatgtatgtaacagcaattaatgtaaagaggcatggatttgcaagagagcaggaaacaatatacaggagggttttaaggaaggaaaaagaagggagaaatgataagactatattttaatctaaaaagaaataattaaaaaattagctacttacaagtatattttatttaaaattttcagaacacttaaaaacatcttgtgtaaatgtaccctgaaaccaagtataatgaggcacatctattaatcccagcaggtgactctgtgaggttgacactgacctggtttccatagtgagttactggtcaaccaaggtaccatagtgagacctagtttcaaaatattaaagtaaaataaactactggttgagataagaagagatcagtgcttacaggcaatggaaatgattttaacaaagataaaagtcaaaggcaagattcttctggaccctttctttgtactcttcttcaagagcacattctcttatcatttccaagttaatggtcttccagtttgtcagctattcctcccatgaccagtgccaaagtccactcagcatcccactgttctggttttcaaggttcaaactgcacaggactaaaactaagggctacagcaagcgccagtgaagagatggattgtgcacccacagagatagggctgctaagcaggtgcaggcaaagctctgggatggcatgagggggtgcgtgtcctagggaccagttgttgcataatcaaatactcctctagcctttcctcttgtgtattttgtttactatgctctcacatttctccattttccacatttttaaagccattcagaagttagaatgttaggagacttatatgctttgccacttttgctgttgttgtctgagttgtctcgctactgtttggatgtgatttgagtgtgtgtgtgtgtgtgtgtgtgtgtgttccccagagatctctgagttggaaacttagttctcagtgtgatgatattgagaagtaatggaaccttaaagagatgtggcctagggcatggtaattagattactagggatgtggtcctctgaagtgattggcacttacattgtgtagtgaatttggggttctcaccagaaggaattggaaaagtacaggttcacccttgaattagctaggtcatcctttctcattatgtggtcactcttgcatgttctcccaccaggatgccacctggcttgaagcccttaccaaaggacaaacatatgaagccattgaatcttgactttgaatcttcaaactgtgaactaatgaacatttttcttatatttttggttatgaacctagcttttaacaactgagtcatctctccagctccaaatttgttttctttaaatacattatgcaacctggggtattttgtcatagcaacacaacgtgtgtgtgtgtgtgtgtgtgtgtgtgtgtgtgtgtgtgtgtgtgtgtgcacatgtgtgtgtgtttctagacagggtttctctgtattgctttggaggttgtcctggaacttgctctgtagaccaggctggccttgaactcacagagatctgactgcctctgcctctcgagtgctgggattaaaggtatgaaccaccaatgccagcagcaacacaacatattaaataaaaatctttgtgttttcctggacacttaagatattatccttttgtttcctactgttctagttacttctgttgaaagtttacactctacactgtttacagatttaccctaaactaatatctggcaaagtctatttcctactgagaactattcaataatgccccactacatagaacatggtgggaagtctcataggcttgtaatttaatttgcaattttcctcaaatttccaaaggtccttcactaggacgcaatcacatgtataagactaggaactatgttcactgttttctaattgtgactatccccacccccaattcttcattttgtagcacactagatctctccctttctgaaaacttactgtgtggcttcttggcttcccaatggaattatcctcttcacaaaggcccattaaagtatgcgcccttcagaaatcttcctctattcttcctcctcctcctcctcctctttgcttataatccgtttcaatttttctgctatattaatcagactgaggagcaattattttgatggatacattcatcctactggtcagggctccctagaggaacagaatatgatgactgtacatactaaaataatttattaaatcagcttctactaaaatagtaacaattgtctcccactgagaaatgaggagctggtgactgctgattatttgctgctgggtgcttgtggctgggtgctccagctgttgctgggtgcatcagcagtaaaagcagtcccacactagctgtctctcattgaggctgacaacctgtagttactaatcctcaagacttggagtctcagtagtcccaggctggtgctgaaaatctacaaggttcctggagagcctctggtcctcagtgaaggatggaagcctggcagccgcagcaatcagttacatttcctcagccgtgaatgggatggccaagtgagcaaaaggtgaataacccttctgccatggccgttttatctgctcctgtaccagaaggctcagaccgcgcttggagaggttcttcccacattagttaaagcaatcaggacaattctttggttgatgctccctgctcagacgattctagtttgtggtacattgatattaaaaccactcaccacaaggaccaatgtgggctggttgccctcggcagcctttacaagacctcacgctcctctgtccatcgctttgttgtctcacggctggtattcacttcctttcagtctacgtgtctgttcaacaacttctcattgcagttgtctaccaaagcttctaaaggttcttattaaatcctttcctatttatagtagttaaggggatgttgagaagcatcgaacttaccgtgattcagttttcaggctgctttgctgaacagtgtgggaggagcaactgcttgtccccaagttcacctcatgtacgattcaagccatgttctcaaagtgagacccaacacttcagaaaacctatccatacagcagaaaccccgctcctttatactataaatagtatagagtaagccaatagtacttaatcaatgcttagaactgtaagctccagcgaaagaaactgattaacaagccagttccccagatgttacttttctttgatcttgacatcattactagcctcatgatttttgttcatttccttctcttttcttttcaaagttttatttatttttactttatgtggaggggtgttttgcctgcgtatatggctgcacatcatgagtgtacctggtgtgggatgatgaatctcccggaactggggttgcagatggttatgagacactgccacatgggtgctgggaagagcagccagtgctctcaacagcggagctatctctcctttcccccatttctttcctttcttctcaaacaacagaaaacaagattggtagcgagaggtacaatttacaagattttgttgctatatttctgagctgtaactaaataaaaggtggagtaattccacatcaatgtctccccaaataaatctggggatttcctgtgagctttgttcccaggaagtcagcaccatatctcattgtggaagtatttctatgtgtaattaatttatataacataaaagaagcaggctttagatgagagagacaacaatcatctactcaagcttattcagtcacacaccaagggcatactttgtattttgttcttattttgatgatcacaggatgtatcttatttgtggcttacttgggctattttcagtgcctggggagacatgatgtacattgtagaataatgcaataaaataattgaacattttcctttgtctggcatatttatacttgtgtgctcagtcacattaaaggggttgggaatgcagccgcctcagctgtaagttattaccctgatggagctggcaggcctggatgctctctcactgagaagcaggctgggtgttccagtggatggattgctccagaggcagtgtagctcacagagagaaagtcgcctgtgtttaaaagacaaaagaacagtctggggaacaaaacaaaatagcatctaatcctctgccagcagaactttttcagggaagtgtcaaattagtgacagaccaaggtccttcttctgaatccaaaatggggaagcaatccagctgtagtcattttaaggatcccagaaatccagctgcggttgcttgaaggatctcagtgaaaacggagatggttgctccatttgttctgacctcagatgggagaaaagtgatttaaaacttgttatttcatcccagaaaattcggttaagaaaatgaaatagctttagaatcaagatgaaacaaatgcaatgtaatttgagagtaagaatttggacttgagagcctcataccaaaggattttcacaacaacactggaaatttggattatatcacaatcagaagtaagtttccatccatactacagggagctggaagattcccaccagaccagctcccctattcaagttgcagtagatctggaaactaagcttgaagcacagacagatatcattatatttacccaatgcaagcaaggttggtttgattttgttatctacaaagcatgactgaagagtttttactgagagtgtagttttcactgagttgggttgggtaaaagagttaaaaaccaaagtgtgaacttgccatcatgaaaattttgatgttcttagataagcttggtgtggcctaagcagttaggagggcaactgaagcagagagatcctgcatttgaggccagccttggatgcacagtgaaattgccttactgaattaaacaaaaagtaaattagatttctgaattcgaattcccttttcttctcaggaataatttgaaaatttacttgactttctaaagttggtttacgttaccagagaaatgagactgttatctcattttgtgataaataggatatgttcccatatttgcaaaacatctatacagagatttctggatctgtgataacttggaatgaataatattgtcaaatgaataattttcttctttactttcagtgagttagaaattggtaatgaattggagttgaactggttaaagaacttgcaggtatcggcaaggataattgtgacatagcctcccttatttggcaactatagaaaaatgactcaaccttacaacgaccatgagaagttgtgtcatttacttcattttataggcaaagaaactatgacaacaggttgaataatttgctaaagttaaacagatagcaagtgcagactgcaaattggaggcaggctatgttcaacctcagtgctctaagatcaggtagccaaataggtggaggaaatgaaatgtgtgtccatggcttgtatcctcatgaaggacagggagagaaaaaggagaagggcagtgaaagggggatggaaagaacaagacaagtcagagacagcagagagttgtgcatttttattgactgtcgttactcttcaccaacttaaaagataaaagcattgacataccaaggatatggtgataaactctgcttttaaaatgtgtcttcatacatatttaagacatatttcttttctttttccctttctttctttctttctttctttctttctttctttctttctttctttctttctttctttctttcttttaatggttttttgagacagggtttctctgtgtagctttggagcctatcctggcactctctctggagaccaggctggctttgaactcacagagatccacctgcctctgcctcccgagtgctgggattaaaggtgtgcaccaccaatgtccggcttttaaaacatatttctaagtatgtatttgtaatatattttatactagttgtgtttatcatgaagaacacacacatttatgataaaaacatatatttacaataaaagcatgtgcattattttgtatttataaacacaataaatgtgagatcatgtcagtggtcttgttttttttttttttaaatatcttaacacaatagaccataaggcatcctgttcaagggtatgtcgttgtgaattaagtaagtgattatcggttgtagcttctgggtggtattatcaatatagctaataaaatagtcttaatgaattgtgtcctaattatgtgggttgatgataaagacaaaaacttacaattaattgaaattattctaattcagataggaagcacttttgatgaggtaggttgagaagagtaatttgatttgtgaatgatttactagtcatcaaagatcacattcaaggacttttctaaaaccaactgtaactttggtttgtatagcatttcaatctttgtgtatccatattttttatgttggaaaatttaattacatttttattttaaaaatttgagacactgtattttgattatattctttcccctttcccaactcctcccatattctctatgcctactcaacttcatgatttttcctctctattaagcacaaacaaaagcaacacaaagttaaaatcaaaataaataaataaaaagaaatgagacaaaagtgccaccaaacaaataaaaaactcagaggcccttttgtgttggtcaactgctcctgcgcaaggatctgccctggagtgtggttaatagtagtgatgccgcattggagaacactgatttctctgttgccatcaggtatcaactgcaaatagtgtcttggtgaggggtgggacttttgtccaattttctttctcagtcctgggaattttatctggtttgaatcctcgcaggtcttgtgtgtactgtcactctttgtgagttcacacatgtatcagttctgttacctctggaaaatattatttccttggaggcatccaccacctctggctcttaacaatctttctgctttttttcttcacagatccttgagccttgaggtgtttaataaagacattctattcataaacaagtgctccaaagtctctcattatttggatattgtccagttgtgggtttctgttttaattaccatgtactgcaagaagaaacttctctgatgaaagatgagtgacatatagatgctctgccaatagtattcattttattgtcttttgtagtataatattagaagctttccccggaggacccaacacctctctagtctcaggtgcttgaatactttagtagtgtcaggtatggattgtatctcatggactgggtcttaaatgcagtttttaaaaagtaatttgtcactcccatatcatttgtgctactactgtactagtgtgtcttgtaggtaggtctctgttgtacataacaaggtttatagttggtaaacttaggattacttttcgcctccagccgcatgcaaagtacctatcagcaccgtgaatttttttaaatttttttaaatttaaattacaaacaagattggattacatgacaatcccagttcccttctccctcccctcctcccctaccacccccccaactaaaaccctacctatcgaatatcctttcttctaatctacacctgactcaacctttcaagcactgtgaattttagttagtaggggttaaagcttgtagctggacactagctaaatttctccatgcttgatgacataagaagttatgtcttcagcaataaggacttaccatcagattgtggagaataactaatagccttggcaataccctgggatgtttgtgttgggacatctgatacaaaggatataggatctctttggctgactgaacaagatgtaacccatgctggcactggaacttttattcagtggaatgacttatcttgttggggacttatttctccatcatgtagtgactctatttatattcttttcatatatgtatatgttctaggaagcttctacattggtaagtttccttgtggcttttcaaaaggtctttagtatttgttgtccttctgcatattctttttttttatttagaaacagtcttattttacatatcattccctcaccacattccctctccctcccatcctcccatgcccgcccaccccccaaccaactcccacccactccccaaggatagtgaggccttccatgggtggttatcaaagtctgtcacatcatttttgggagtgcctaggccctcctctgtgtatctgggcttaaatagtatccctccatagggaatgggcttctaaattccatttgtgctctagggataaataccggttccactgttagaggtcccatagactgccttgacctcctaactgacacccatatttagagggcttggtttagttctccagctttacgactgcgctccctgtgctctcattaggtcaggtcagatgtttctgtaggtttctccagcacggtcttgactgctttgctccaacccctctacttatttaatccttctagttctagtttttcctttatttctttataactttatattctatttcttccttctttgaagatctcacctttccccatggccccttacaatctatctaacctctataattatttgaatggaaacacacatgtctaacccttaaacaataacatccccatgtgagtgatagcacccacatgcagtatttgtcttttggagtctaggttacctcaatcagggtgattgtttctaacttcttccatttactttgaaatgtcatttttcttaacaactgaataatagttcactgtataaatgtaccacattttcattattcattcatcagttgatggacatctgggatgtttccaacttctggctattaagaatacagcagtaatgaacatggatgaacaagtatctctgtagtaggatatagagtcttttgggtacatgctctagagtggtgtagctgggtcttcttgtagatgtattctcaggtttgttgttgttgtttttgagaaatcttcacagtggttttatcagtcttcattcccaccagcaatgcataattgttccctttcccctatatcctctccagccatatgttgtaatttttttcattgaacttggtcattctgactggagtaagatgaaatttcaaagcagttttaatttacatgttactgatggccaaggatgttgaacattttaaaaagggttttgcaaccacttatcttttgataatctctccttccttatttctgtaccttatattttaattgagatgttttcttgatattcagcttttaaaattctttatataacccagatactaactatccatcttatatataattggtaaagatttttttgtattctgtagactgcttctctgcttgcatgatggtatatacttttgctgtaccaaagtgtttagttttgtgaggtcccatgaattattatcagttattgatcttagtgccttatagttatatcaatgtcctgttcatataatcctttcctgtgtagatgagttaaaaatactccatacttccttttctatcatattcagagtatctgaatttatattgaggtccttgatccctttgaagttgagttttgtgaacagtgataaatatggatctattttcattcattaacatgtagttatctagtgtgaccagaaccatttgttgaatatgctgccctttttatattgtgtttttccgacttcttttcttttcttttcttttcttttcttttcttttcttttcttttcttttctttgtttttcaaaaatcagatgtccagaagggcttggaattatgtcctggtcttcaattctatttcatagcttaacaaatgtgtatttatgacaatctcatactgtctgtattgctatagctctataatacaatttggtacctaagacagtgaatcctccagtgtgtgtgtttccatatgaatttttgtgaggaattgtgttggaattttgatggggattgtgttgattctatagactgcttgtggtaggatggctattttttttgcaatattaatcctaccaatccaagatcataggaaatatttccatcttttgctctcttcttcaatttctgtctttcttagtgattttataaagcaagtctttcacttgcttagagatatccaacaatatatatatttttgagtctattgttaaaggtagtctccctcatttctttctcaatattcttgttatttgtatgtaggaagactactgatttttgtgtgttaattttgtatcctggaaaatttcaaaggatgtttattagctatagaagtttcctggtagagtctttgggatcttttatgtattatatcatacaatcttaaagtatttcaaaagttgatcatcagaaatattgggagatgagattaaatgatttttttcctgaatgttcttgcttttgaatggtcctgcaaaatgaacccagcttactaaaaaaagaataggagattgtcattgaaaaatgtgccatcagttttacaattctagacaagacaaattcttttaaaatgtgttgattgtagattatagcaagtcttagatagaaatgacaactgacaacttaaaatgtgttttaagttaggctcagacctctataaattttatttcgttgatttttgccactgataaaagcgactgaaatatacaatcttcctctctttcatgtgatgctcaagacaggagaaacaaggggctccattactcttgttggtcttctttccccttaaatagctgtattgaattttcattgtaacaaagtgaattgtataaattcaatatgtacacttaattaagttttgaattaccttacaataagttctctcaacaagtagaattaacctaaaatatcatcatgtcctatttccttataccattccacatgtggtgagcattgcataatatgttagttatattttggttaaggcaatatgtcgagactcatctcaaaacattatcacaattaatgatcttatttccacaagaaagcacattctaggggcttgagagatggctcagcagttaagacactatctgctcttccagaggacctgtgttcaattatatcaggcacatggcagctcacaggtgtctgtaacttcagttccaggggatctggcacactcatacatgcaataaaaataaatcttccttttttgttttgatttttcaagacagggtttctctttacccattggaagctgtcctggcctctctagacgcaggttggcctcgaactcacagatatctgactgcctctgcctcctgagagttgagattaaaggcatgtgccaccgctgtgcccagctgtaaatcttttttaaaaaagaaaagaaaaaaaaagacacattctaaattcttcaacatttatttgagatagaatgctaaaacatttcatttgtcagatgaagaacaaatatctaccagttccttctgtggaccattaactgtatatatctgggcttccccctattccagagattctcagagaccattttatatcacagtccccataaatccaatttgcttaacatcaaaaagtagcttttttgaggtacaattgctaaagtgttgttaaaagtggttgtatgctatggccagtacagctgtgggcatcacaggaacctgggaaggagggtaatgttagagagagatataagactctgggctcacttcaagaatgaatcatttctattttcccaactgctctttacatattgctcaatagctaccagaaatagttttgcaagcagagcttgagcaaagtatctttgactatcttatctgagttcttccttctgctcttccaaggcctttgtgaaattgctttgccctgaaggacattcttcccaggatttatattgtgcctgaagttttctgcagtcagaatttgtcctggaaaaggagatgcagaccatctggacccaaaagtgctagaatgtccctgatgtctcactccttttcataaaagacatcttttagaagcaagaagctatggcaaccttagaattttgaatccattcttaaaattattgtgacttgatttttttgaagccctttatttttcattttatggatattgatattttgcctacatgtatgtctatgcaccatctggtgcattgctggtagaagccagaagatggcattgcatcccctgtgactggagttccatgggtgtaagcagtcatatgggtgctgggaatggaacccaggtcctcagctatccagtcccttcattcttattatagtgtaatatgaatgactatagtcattagtatgatgatgggatttatctttattctgaaccaattgctgacgaaattataagactggagtttgtgcattgctttggtccctttattgtgatttctgggtactttaaaaaatttattctttgagaattgctttcatgtatacctcgctgtctttttttatcccagcaagatttgggtgaaagctgttaaggctcaaatccgtggaagctagtgttgcatgcgctttacatggatttccacatttggtctttgctgcaagcttatgaactacgtgtcatccttctaaacttactgactagaaactgatgccctgggaccaagaaaatgtgctcagtagcacatggtttgaccccaagctctgccctgacctcagtctgcttggaaccctttaatttatatagagcttctattatgcaaagggtcttgcttctaggctctttcactaacattgttaatttagataaggcttctctctatgttttaaaacatcatctctgctaaatggaattaaaaccatctgagagaaaatgtgtttgaattaaaacctatcctacaattcaaaaatcatggttcacattttaagccttgagtgttcctctgaccactgacttttttctctttcctgttctcacttacacttcatacctaaggatttggtatgtgtgttcctgaatattttctgagtttcactgttttcctgtttagtaagaaaagtttaatcatctgtgatgttcattttagtatcagattttattctgtttgcttgcatatttcaacaaggtgaagatgcataaaataacaagtgaggaaaagtctgaaattagaatcaaagatctggcatggtcggggcatgagagatctatttaaatttgcctttaaccagtcacatcagcaaaagaaatttgtttgaaatttcctcatcacataatgagttcaaaactgaggttcaggagccagtgagatgacttggtgggcaggcatttgatgtacaagcctggtacctctgttcaatttctagaacctgggtaaaggtggaaggagagaaatgcctacaaaaaattgtcctctgattcctccccccccgcccccacacacatcaggcacacacatacaataatttaaaaattgaggtttgagcaaaattctacacgctactttagtcattgtttaggtttagtgtgtctgtgtgtgtttgtattatacacttgtgtgtgcatatgtgtgtgatacacatttgaatgaagaaaagcttagcaatgacttaggagccatgttgattaaagttgggcttcatttcactttgcccaagtttactcattccttctgcaaattggaatcaagagtcactgaatctgtgttgcataccctttacttgtctgtgtgagagcacaggcaggcatgctctcaaatgttgactgtgagcttgttctgactgtatagtcccatcatcctgaaatcttcatatgcttttttttgtctcttcataaacaatacaaagaagttgacaggtctgaaaggggcttatgtgaaaagataattaagagctttagagagtgtcaagagtcaatagctcagcactgtcagcactctggagtgttgcaggctataattagatggcatggaggtgtaaggcatgcttggcagttgattcctgcatgatctccaggggaaaaaacaaagagcagtctccatgagatgtcaagcaaagtggggagcagatgtacaggactcaattctctcaagggtctgttctgtttccccagatgccattgttttggtgagaagtttctttgccttatgactagtattcatgtgggcccttttgtctgtgctcaaaactccccaaatcatccaggatttgggcagagacctctcttcatgctatgaatgagatcattcctcattggcctcaaaacattgtccttattattgaataaaattgcaactttttgacttttttttgagattatattagaattgcaatatttatcccctccatttcctctctccaaactgtcccttatacccgtccttgttctctttcaaattcatgagctcttctatcattaatttttgttacatattaatattagtggtcaaaacttgaccttaagagtttcttattatactaaaccttcaattgaagaacaacacttaattttaaaatgttgtgcattaattaaatatgtttatacttatagtttactaaatacttagctaaaatatgcccatataatgatataaatcaaataaacacaaatttagagagcatgtgacagcaagttggcttgaaataaactggtatggtctctaaatgtaactattcttaaaatgtatttcttgcctcaaagaaatctgacttgattaaagaataaacccacacagatctagcaattttgacatttccttcaataattttaaaataagaaatcataaaatattacagataaaactgaattcctcctcagtctcattgcctttattcattccaagtacaattactttagttaatattcaatagtctatgtacagcaacctgggcagcaggctaattcaacaggatgagttctttcaggccaagatgttttaacacattttagattctaaagtttagaagaatcctcttgaatctctcattctctctaaccctgaacagcaagataacctaggtcctcattatatcttaaaatgttgttttatctcactcagagctgtggccttgatttatagtcctgcaaagtatcccttccccaactgactttttgtattatcttcacacctattcctcttttgttagacacttttatgccatttaatgctttctaatgctctgcaaagctccatgttctatacattagtggtcaggaacaaaatctagtctttaaggtacaaactggggctctagggtctaccccaaacctaattttcaagtttattgtcacttactgttacttatgcattggtgttcttcctgggcattaacctaggtctcaaccatgccctagttttccacatctctttggctatcaatagaactattgctgaacatctaaaaatgatgctatctgtatgaaaaattactcaacagtttgtgtcttcactacttaattcctactcatactttttaggtactttggtaatccatatattaattagctcataataattgctactgatataagtatctaactcttcaaactttgaacccaatcaaatcaaagaaaattaagctcattcccattgtattcctctgaatatcaccataaatattttatgaatttgtttaatagagtagaagatgacaaaagaagtattattttttattgagttttacacttcttgcacttagaatagcatttggtatacacgaaatgctcatgaacaggacttaatatatcagaggttggcaaactatggactattgattgaatacattgaatacagtccatgtttgtttcaataagcaaagatctatcggaacacaccaacacattctcttatatattgtttccattgctttagaacagaactgagtagtggcaatggactgtatgactcacaaagattaaatatttcctagctagccatttccagaaaaggctttctgaccaaatgaatgaaaatgggtgtcacaagatcatacaataacacaaattattactcaaatttgtcattttagaaaattattcatgtctgtccacatgaagatatacataaaagcagttattgccagcatttgtgcctttatttgatgatgtgtgataatcacttgtcatcaaagataatttagacatatatttgggatcatatctattcatatacatatatacatatgcatataaacccatatatgtacatacatatcatatataatcatctaaaatatatttatatatgtacttattataaatataatttctgaaaattctctgcaatataaagaaaaaatgatcattccctaatcatacaactcactgttttaaaaaccatattgaaatatttctctgattgtttttaagaactcagcaagaaattccaggtttgcatacatatattcattacccgctgaacatccaagactgacctgcatataattgcaaagaaagaatattataattccattaaaatggtggcacttattacatgctaacgtgtgtttatcctaaaactccatcacctgatgaatatgcaattaacctatgcattgccacagaaaacatctccttagaaatgcaatataactatatagtttttaatctgatctttgaaagctttctgtaggaaaaataatttttccaaataagatatattattggaaacacaactctgtgtagccaattctctacatcatctgatttattttaattagaggttagctgctgaatgtgattacagcaataattattacaataccagtcacccacgtttccattaacattccacttgatagttagcaataagcagaaataaaatattaggacttctaagagaagagattgccaattagtacaattctccactggcacaagataattattaattatactcatcatgataattattcaccaagctaaattcactgggctacctgcactcaggttctctcagctctgcaccctaacaccagctccttcttatctgcttggaaaatcctgaagcaatgtttgtattaaatacacagttgactgcacaccaaatggaaaagcagtcgcaaaggggcaggacggatctccatttcattaaaggatctcttctctgaagggcaaaacgaggtaaggaaagcaaaacatataccaaaggaaaaagtactaaagctctaatcgtcacacacatgtgtgctgatcccacatgatcaaattgaccccaaacagccctctccacagcaatattcattttcctgaaatggccacatagacccacaccacatcacttgttgtaaaggtaacaaactaaatgtggcacttgttgatactcaaggactgatactattttgaggagttacagcaatatttctaggcattatggtttctaatgtgcattcctgttgtgctgaaacacaaagccattattttgcagtttatatgttcttgtttgtaaatgccagaataaccaccataatctgtgctaaattttctttatcacatgaaaagaatgtctagaaggttcacaggaaacaagcaccaaatagcactgcaagaagggcagttttctggaccggatagcactaggatggcgatcagatgagtcagagctgatcccctcttagattttcaagggagattactggacatttgtctttttgccttgtatgggggctgttagtagagacatattggattatatgtgacatgtttttcataaagtataaggcgtgttcgacaaggttttcataaggtataaattgttcaaatgtatggcaactttaataattcaaagaagacatgaacagagggttaaatgtttctttacaaaataacacaagagcattaggtatcatgtgatttatgattttacagagtaaataaaaatgtggcattgttgaaaacaaaacaaaacactgctgtttggaaagatattggaatttctctaatctcccaattagcaaacattgatagaaagtataaagcaattgagcccccatcgtgtgnnnnnnnnnnnnnnnnnnnnnnnnnnnnnnnnnnnnnnnnnnnnnnnnnnnnnnnnnnnnnnnnnnnnnnnnnnnnnnnnnnnnnnnnnnnnnnnnnnnnnnnnnnnnnnnnnnnnnnnnnnnnnnnnnnnnnnnnnnnnnnnnnnnnnnnnnnnnnnnnnnnnnnnnnnnnnnnnnnnnnnnnnnnnnnnnnnnnnnnnnnnnnnnnnnnnnnnnnnnnnnnnnnnnnnnnnnnnnnnnnnnnnnnnnnnnnnnnnnnnnnnnnnnnnnnnnnntggtgggtagagtagaatatccctgagaacctctctcagagggcagatgggctgcctttgccagcaggaggcatgaacctgctgcagctgtctctgtgtgacagccctgatcactgccttactgattctaaataaagggaaaataaagtaaattccaagtgattcttttcattgctgctggtgtttgctgccaatgtttgcctccatgcttgaaaacacggacaaagatttgtcatttgcaagtgctctatttttcgtgtttaaataactcctcccgctctagtggcaactgagctgagctggagccttccactagctgcttcagggaggggtacatttgctcaacaaacatattatgagtaaaaagaaagcagtttgtagcttggcattgggtagtgcttactcatgttccaagattcataggagaaacaagacagatgtggctcagattatctttggatgtttatcattttaagtacttggaaagcctagtttatgtaaatttcagtgttattaaagacttacagatacattagtcattcttgttattttaattttgttgcaatttaaaagaaatagatatctatgctaggccaaatttctgaaaaaaatatatctttgtaatttttttcctaggaactggttattttagcagcttctatgaacaaaatagcagtataatttaaccagtaatttacctaaaatcattttattccagaacctaaaagtcaccctaaacaaaagttctctttgtctaaagtgttacatgaaaataaacacttgtagtttattttgagagaattgagtgttttcatgacgatcgaacacttagtaagctctcgaggatgcaagggagaagaaacaacctgcccatacctcaagagggaaacaaaggaatgagcaagagttaaaattaaatctcttttcaggcaccatccagaaaactagtattgcactttcatgctatgcaaccagcacatctgcaccactgacagtctggggttttgtttataaatctgccctcagagataagatgaggagagagtgatttgtgaaaattagaagaaagttgataaaaagaagataataaaaataattttaagtttaaaagttagaagtatttgttgtggatttaaggttattgggttaaaaacatgacctggaaactgtgttatagatttcttgaagttttgaagacaactgcttcctcctgctttcccggtgttactgtgtgtaagtgataaggaaacaagtggacagattgggatgagattatttcctgattctataatgagatgactggtaaccaatcagattaagaaatgacctgtgactcatttgaaggttttactgggtgatggtgctttagtttgtttaagtccaatcagaatccataagaagtaaacgtttctgtatccaattattgtggtcatgtgtcagggtacttaattctaattcttagtccctcactcatattttcttaacctaatcattccctgtcctgtagtgatgaatttacttattccaaacattttaggcacacagcaatataataaattcacaggaatgttatgatgtggctttttctagtgagacataaatatctgtccaccatagctaggacaccaaaggctgaccagaaaaaaattttcaacctattcttgttggtgaatcaatgagtctattagggttacttacaggagcatgaatgcctgaaagttactagcatcctcaaaagcccaccccagcataggtgaggattctcaaaagttgattccgtagagctttccctgcccatgctgtagtctcttctaccaggcagtctgttcttccctggcaattgcttaatattcatatgacctttggggagaagtgttataaatacaggggatcctgtgagtttcatagacttgcagagctttgtaaattttgttagtatcttgagacttatgcattgctgtcctgggtgttttgtagaaatgatcaaaatttgaagttacaagtttgaattcacatgaattgttggagaaatcacaaaccatccatatataaggtttagttttaggagtgaggagtggatagtggtcatgggggagttgataatccacttataaatgtttcaccctctctaactccaacttagtcaatagttctccttttgttggacagctttggagctttgtgagcagcctccatgtcccagaatgagccagtgaagggagagaaaaaggaatcctggagtaatagtggcttatgtccactcaagaagttatattctgtctcggaggtagaatacatcaatttttacccttgagtctttaatatctaccagctatttacttatttactttatgaacttatggggataaaatatctcccagggctcacaaatacacacacacacacacacacacacacacacacacacacacacacacacacacacacgatagtgtcttcttgttcttcttcttcttcttcttcttcttcttcttcttctctctctctctctctctctctctctctctctctctctctctgtgtgtgtgtgtgtgtgtccatcctactaagtttacttgtcgccggcagtatgcacattgcaatggggccatccactggaacatagacaacctagaagtggccacacactcccagatgactcttcttcctcagcagcacttgttgccattagctctatatctaggactagagccccatgagcccctcctctgtccatgctcgaatttgtactagcttattttatttgggtcttatacagggaaccacagctactgtgaggtcatgagtataagagccatgtcctgtccagaagacagaatgtcacaacactcctcaccatcctctggctcttacggtcttttgtctgctcttccatggtgttcactgagccttagtgggagaattgatatggatgttcaactaaggctgagcgctcacagtcacttgctcacagcactttgaccagatattattctctgcactgatcactgtacactggaaaaatgaagcttctctgacagaggttgagaacagcacagatctatggttataaatagtagcatttaaaaggtagtttgacaacagggccattcagcacaataacagtggtaggttcctccctagggcatatgactttccaggcatagatttttgatcagatttacagtaccaggcatagacttcctccagtgtagcagacctcaaatgtaatactgaaacagtttatcaaccctcataacagatacactactattgcattagtgtgcatatcttgcatggaaagttggtattgtagcattcccaattcatccttgagtaagaccattattaacttttctctgccaacaggctgcaaaatactttctggtagtataaaagctagccagtaaggagtaagtttcctggttagttcaggattgatttttatgtatcttacaacccagttgtgtggtgtcttctgtaatatggtcttaccatagttacgttgagcagccagcaacaatgccaatagcctgtttcatttcagagatctcaggagcttccctggccatgtctggtactggggctttcattaaataatccacatcttctgagatcagcactgggtactgatgcaggtggtcctgggggttttataacatggagagcaagccagtaaacatcattcctctatgatctctgcttcagttcttacctcctggttcctgctcgagttcttgccctggcttccctcagtgagtcatggactgtaagacagaagtaagccaaatcaaacctttcctccccaagttgcttttgtcatggtgtttatcacagtaatagaaaacaaacaaaacaactagctcttctagtttctattcccaccaacagtgtataaagcctccctttccccacatccaagctatcatttgtttgttgtcttttgtattcctgatcttggccattctgactggaatgaaatggaatcttaaaatagttttaatctgcagttccctaaagactaagggcattgaacccttctaaaagaaatacaaatttcttcttttgaaaacgtcctcttcagttccatagccgatttttagttggatcatttgttttcttgatgtttacttttgtaaggtctttgtatattctagacactaatcctctgtggtatgggcaattgacaagaattttctccctttctgtgggctgcctcttcacttgactgacagtttcctttccccatatagaaacattttagtgtcatgagttcctatttgttgactgttggactcatattctgagctatacagtactattcagaaaatccttacctgtgcctgtaagttgatataaaatactcaagcagtttcacagttttaggtcttatgatgagtccattggttcttgagttttgtgcaaggtgagagataaggatctctcttttctttccaattttattaatttgtatcttctctgtctttcttttttgtcagtttggctaagagtttgtaatgcatgttcaacatttcaaagaatcaaattttcattttatcacttcccatttttaaacttccatttcattaatttctgtgctgtattagatttctatttaagtgtatgtgtacatatctctgtgaatattaagcaacatgcgtatgagtgctcgcagagatatcaagagggtgataatatcccctgaagctggagttacaagtaatcatgatccccacaatgtgcgtgaagggaactggacgtaggtcccctgaaagggcaagaaatactcttaactgctgagccatccctttggcacccaaactcattttatttttctccatttagtgttttggggtttggtttgttcttgtttttccaaggtttaaagtatatcattaaattaaagttaaatttaatttgtgttctctctgggttttgctttttactgttattgttttcttttgtgagacagtgttggactatgtattcttggcaggcttggaactcactgtgtagatcaggctagctttgaactcacagggacccacctgtatctgtgtcttgagtgctgagattaaaggcatgtgccactgtacctggtctctctgttgtttttatgcaggcaattactcttaggacttcctaaattgtgcaccatagagtttggtttatcgttttcattttcatccaattttaaaaatatttttatagctttccttcttgattccctcagtgacaaattcatcatcatttagtagtgtgttgtttagtctctatgaatttgtacgttttcagtagtctttattgatgttgatctctagctatattctattgtggtcagatagactacaagatgccatccaaattttcctgtctttgttgagccttactttgtgtcctaatatgtgaacaattttggtaaaagttacatggattgctgagaagaatgtgtattatttagtgcttgggtgggatattctctagattttgcttagatccatttgatttatgaagtcatttcattaactccagtgtttgtctgtttagattttgttccagtgacctatctattggtgagagtggggtattgcagtcatccactgccagagtgttgtgattaatttgcggctttaagtctagctctatttgtcttatgaaattgagtgtacccttgtttggtgaatataagtttagaattgtagtttcctcttgatggattgttttcttaatgagtatgaagaaaacttctttgtctctctgataagttttggtttggattccattttgtcagataataaaataaatatgcctgcttgtttctcagttccattggctcaaaatacccttttcagcccttttgccttaagctggtatataccctggatagtgaggtgtattttttattttttatttaaattctttaattcctaatcatatttacatatatatcccccattcactcaccctcccatcctcccatgtcccctccactcccctcaagccatcccccaactcctcctcaggaatagtaaggccctccaccagagaccttcaaagtctgtcatatcatttgagggagggcctaggccctccttgttgtatctgggctgcaatagtatgcttccataaagaatgggctcccaaagtccatttgtgcttagggttaaagactggctccactgttagaggtcccatagactgaggtgtatttttttaatacagaaaaagaaggatcctgttttctaaactaatcggctagctgtaattttatcaagtggatgagattttagatatccagaatgatggttgaacactacatattaattgtaggcatttttttatgattttgtgatggtttcatagacatttttgctgccttcttgggtgtgtttattgttctctggagactgaaggattccttcgagtatcctctatgtagatgacttagtgttcagaacatgctttaatctacttgtatcacaaaaattttaatttattattcagtagttatcctgggtacaagtagtctctgttttgtactgtgttctgtcaaaagtaataatacatctttctagacccatctgggtataatcttccctgaattagtcaaattttattttgatggacctagctttaaaagtgatttgacacttctttttttttgcaagtgttaatactccctcagctatctaaatatttttattatttgagaatatcatacatgcatcatgcatacaaagtgttttaatcatatgcacccctcattcctctccctaactccttgaaaatccaccctaccccaacacatgtccttattatattgtttttattttataacccatcatttccaatttatgctacctatatatccatgggtgtggggtgatccactagaacatagtcaacctactctcactctccatgttgtaatattgactagcttaagcctgtacaataaattcctccaatatttttagtgttttaaattcctacatggggaatttctcatgtggttttgtattttttgttttctggagacttctcttacacaaaatatatctttgttctactaaatttgtgaaattttcatacatgatttattgaaaatggtttgtctttggtgaggtgttattttatgactaatttaaaaatgtgtttttttcatagcatcaccaagctttcctaagtttaatccataatttaaaaacttatttctgatatttactggatgatctaattcctctatcttgtttttttaagtactgatattctgtttttctcatgttctattctactggtgaggctttcaactgagctttttatttggtttattgtgtttttcatttccaagatcattttagtttgtcttttgaaaatattactatctctttatttaattctatttcatatattttattgatttccttattttatttagctctatgagtttttcctttggaacattgtacattcatatcttctttatattatttgggcacagttatcatcattcttttgaattctttgtcgggatttcatccaagtagttctcactgaggttgttattacagaattagtaatttttgaagaagatatatttccttggtttttcataatttttattgtttcatggtgacatatatacctgaagttagtttattggctgaatctttcatttgaaattcaagtcacctttctgttttcagtggaaatatttgtattgttcagggtattagttgtagtagggctgaggtatcattttcttccatgagactagtattcagggccataaactatatctttgctcttctctgaaagtcagctactgtctgaattagtagtcactattcaagagtcaacacatccctggtttgtctttgtagtgtggctctccacattagatccctaccctggactggctctagctcaatcccttctgtttgcccataattatttagtgtctctgagtgccatggtgtcttagcctgtattagttatgtcctcctatccacttgtatagctttttccaagtgttgtatgtaggatttgcaaaccagagtatctcacattgggtcagctttagtttcttctctgggtccagagcttcccccaaaagttgtgtaactaactttattcttcttcctcccctgtctgtcgctttaatctgagtcactttctgttctcaggtccacagcttcaaccataagttgtgagattctccgagactatgtaccttatcatgggtcagctccattgccctatcccctggacttgaagattcttccaagagttgtacaccttaactactcaattaatagctttattctgaaactgtaagcgagctcactttgtataaagaattataggaaagtttgaggctaagacaaatttgacttccccaacatatgccagcatgagtaacaacagcttttcatctggctatggaagctaatgcacttcagttggctatgagagatggaacttttcagctgactctagaggatgatatagtgttggtgacatgattgctcaggcagcagtcgaaattagattcacttttgaaatggcagcatatattatatcagtttaatagtgccatgagtccctttaaactttgccacatcaactgtgctctatacagtgtttaaaattactttatgttttcagtaacttttaaagattggtgggattgagaacaggttctacaagttatagatttttattggctcactgattattttttgaatgtaaaaatactttgagcaaagtttctttagggtcctccctgtttactagcttctctggcagtgtgcattgtaggctggttatcctttactctatgtctaaaatccacatatgagtgagtacataccatgtttgtctttttgtgattaggttaccttgctcagaatggtttcttctagttccatccattttcctgcaaatctcaagattctattgtttttttctgctgagtagtactccattgtgtaaatgtaccacattttctctatccagtcttcagttgagggacatctaggctgcttccagtttctggctattaccaatagtgatcctatgaacatcattgaacagatgtccttgttgtatgaatgtgcttcttttgggtatatgcctaagagtggaattgctgaatagaagataacaagaatggagataccataatagagggagacattttaggtttacagagaaatcaggcactagggaaatgtctggagatctacaaagatgacacgagctaacaatctcagcaaaggaggagaggctaccttaaacgccctccccagataatgagcttgatgactgacttatatgccacctgagagccctcatccagcagctggtggaagtaaaagcagacacccacaactaatcaccgaactgaactggaatccagatgcagacaagtgaaggggtccagaccaggctggtgaaacctacataaacagctgacctgaacatcggggaactcttgctccccagactgatagttgggataccagcatgggactgatccagaccccaggaacatgggtttcagtgaggaaacctcggaaatctacgggacctcctgttactagttcagtacttatccctagtataggtgtggactttgggagcccattccacattgaggaatactccctgagccaagacacatgggggtgggcctaggccctatcccgaaagatacaatagactctgatgaccccctatggaaggcctcactatccagggggagcagaagggatatgtgataggaagggtttagtttgtggggttgggggtggggtggggggtaggggaggatgggagggattagggaactgggattgccatgtaaaacaatcttgtttctaattcaaataaaaaaatctgggaaaaaatactttgagcaaagtttcaaaaataatttatgctaattattgaaattatacaaacaagtttcttcccaataatttttacttgtttctcaagaatttaaaatgaagtttgatattttataagcattaagcaacatcattgtataataattgattattcattattcacttttcaatagctttgaaaagatttcagaaaacatttatgaatgaaaatctttcagaaaccttaactcagcagtcatgtttaaccttatttaaaacattatgactcaaaagaaagcctatattccttcttattgttctctggtcttctgcagaaaccattatgtcagttattagacctcaaagcatcttctttccaaggtctcatctcaggagcaggtgtggctcacagtgtactgggtcccggagtagagtccacttttaaagctggcacagaattgtcacaaactcaaatgtttcatcatgaggccaccctattcccattcctagattaaagttcttttctttaatttttaaagacttatttatctcatgtacatgaatgctctatccacatgccagaagaagtcatcagatcctactatagatcattataagccacaatgttttttcctgggaactgaactcaggacctctgcaagagcagccagggctttaactggtgagccaattttccaacctctagatgaaagttttatttttttacatcagttatattgatttaaaaggttgtgggagacaatgaacaatattacaaatacttatacactgtaaggtgttcataatgattgagtataagacaatttatagaatgtccaaaattagatagaatttttccttcaaatagctatttgagcatctatttttaatctcttcatcatacctctttgagttttggggtattttgacatttgcttccatcttcaacaatattatacacatgtattatttaattccccatatcattttaatagactggtcatacaccataaacaatcagtctttgagttgagtcattatatgtaactgcatgggaaaattcatgttcatgaagatagcactaacagagagaacttagtggagtgatttttccttttgtctttctgtaatttaaagctttctgctaaaactactgaaatatattcttccaaattttataacattataatgcaaactaattagaaattaactgatagtttttcactatcagtgttacaatacagtagttcagaatggtagatgaaagaaagccagattttcagttacagaaattaaaactttaagcatagaaaaagttctaacaggaatgcaattatcaattatctgtacagttgctcagtgtttacaagggtttttaaaatatgaaatctatataatgatgtacatagatatatcataaaataccttccatgtactttggaaaatatgtcttgtttagtaaagaatctatctaatattataacacatgttttcaaaatacttctagaacatgtacttaaggacttgcaagcctactagagctacacaagagctaatgagaaatgcctcaattcatctagggatgggaaagcaaatgttttgtgtgagaaagaacatgctacctcctggatttgtgttgcatgattttgtgtgggatgttgttaacaaggtagatctcgttttatcagttccttgagaacccaagggagacaacacaggcaagcatggaagaagtattcttgaatctcccactttgaaagtccttagccagttggtatctgggatctaattctgctgctcaagtacacatgaggcaaatagcaaacatattaatcagtttctaacaatcactcaaattttaatcacttttatttaaaacttgagatgttaaaaatgccccatcagacattcacaacatttctttagatgtggttaaaaccgctctggatcctcactgttgacattttcctcagcttagtgtttaccagtacattacagccaaggtgtgattaatgggccacatgaaccccaggatctctataaatgtgacccagcatgaaatcataaagtttcataaaaccctaaggtttttcatatggcttggttttctttgtgtgtgtatcttgattgcacaatactgaaatatgaattttgcaaataataccatcaggtataatgtcaaaaggttaaatatgccttgtccctacactgatgttgctttgacttgcaaacatgtgacttcttagttggagattttcctgtttgatgtaatgtgatctatggtttgcactgagataatagactattattgatgttgtctatggttactttgctattactaatacaaagactactgaataggtcccaggctaatgacagttttaattccaggtgacactataatgacgttaaaatgtaaagtatgactagacatggacaaatttttaatattaatagaagttatctgtgctgtgggcaggatatgcagaatgaatcagagattctaatgcttcagcacaacatgaatccatcatagtccatatgctgctatctgcaataataaataaacttatttatattaaaatacctttttgttcctgatttttataccttatttttgttaatagaggtatttttcttttcaaaaatttgttgttcttgctaaagagttagtttttgcaatgttacccatgccacaaatcctgttgatgtgcctaactgatgcaaatgacttctctaatggccctttaatccattttaccccagtgttatccttctataacctcagcttcaaacatctcattctccagcctctgcctcatattttccacccaacaatattgggttattgaaaacctatattctttgatctgagaggacttatttcacattttcacaccctgtctccatgctatctcttttttcttattgttaatttaatggtgtattatacaataaatctcctgaaacattcccagttctcccctgcctccattgtaccaggctggacaaattataatgttgcttgtggtagactaaagatttgctatggcatcaaaatcctaaaaaagaaatctcttgttgtcatgttatatgaccagagagactttccagaaatgattatgaattttaagaaagcagcactgtcctgtattgcataaaagggtcatatgtacaatgttcagtgtgtatatataacagaaatggtgtatatttgtcacaaagactgaaggaatgaggatagagaaaaagaaaggaatttaacatgtggaacacatcacatacttttccagagctatgactgaaagcttgatagacacaacttaagggaagaaagatatattgtttgattattttgagagttcattgaagactcatctttgcatgtggcactgggaacagaaatgcttctttgtttgctggtagatgggaagtggagactatggaaggtactcaaacccagaagaaccttcaaacacactctcagtgacccaattcacccattatgccccactttctaatgtttccagaaccttccaaaggggaccctctgagtcatcactgttttactgagtttgttcctgacaaattgttttaaaatcaaccctcctcaacagtcattttatactttaaaataatactcaagccatcagatgacccacaatcttttatttattatagccccaaactttattaaaagctcttgggatcctaaaatttgctcttttacattttattttactctgatgttgccagtacatcagagtatagaatagtgcttgagaaatatgagacactcaataagtgacttgaataagtacaaaaatgaacaaatcaatgaataagtaagataactggctgttgcttcctttaaaggaaccagtattaagcagaactgatgtaagtggagggagcaaagccaatggtgcacacaaagcacactccagggtgacatagaaaggcatgcacactacatggtatttcatcatggtaaaacattgtttattaatgttttaagctatttcacaggattgcaccattggtggttcttttctgttttcaccttgatattttctttaacattgaagttttctccttctttgggaaatgaaacctggggatactttttattttttccgatgagtggttggtggtagtgttaggaatatcaaatatcattaccatataaagacttccatttttttctgcatgtgtatggaggaattagaaataaagggtagtatttaagaatgaaatacacagtactctgactattttctcttttgttccaaaataatttattttgaaaaatttcaaaccagaagaaaaattgacataatagctaatagctaatagttacagttttttaactatatgtatcaagtactactgtttttgcttatatgtacatttatgaccacacaaatctatctctccagttacattttcctgaattgcatgaaagtaactgaatgcatatgttttgctatatctctaatgaatgatattattaaataaaataaaaaattttatctcaaattactaatgtaataatatctactctaaagcataccttttcaaaatttccatttgcttgaagaaaaatatctaaaattacttatttgaagcacttctcttcagtattgattactatttgtttttagtcaattttatttgacagtaccactcactctacctttttatttgtttggattttattacatgtcttaatcgctttctcattgctgtgataaaatatcctgattttaagcaaggtattttgtttcatagtttcagaggaatacatggcaggaagcctgggaagcaggcagagaagctatgatagcaggaggttggttaatcgtgatgcatgcacattccgaggcagagtgtgaacaagaattggggttgagctataaagtttcaccccatgtggtagtttgaatgagaatgccccatatgctcatattttccagctgatgagactggggaagattaggaggtgtggcactcttgagggaagagtctcactgggaactggggtttgagattccatgaggcatcaccttggctgaagtgggtttttcagtgacctatctgcctttgagtaatgtatactgtaagcagcttctcactcatattctttcatgtaacccctaataaggtggactttggtggaatcattacttggatttataacttgttccatttctggagagaaaagatgtttataatgcatctccccaggagcagtcacacaacacggatgaaaagcttttccagtccaatctagcttataaattgtggttacatcttcatagttacaaacaccaataaaaaccagaaggatcacaaaagaaaattccaacagcaccaaaggaacaaaagacagtgccaaaaagtgacttgtaaaagtttgccttctacaaaccagagtaataacctcaaaggagctcatgaactaaaacaagcaaacaaataaaacaacagattttcaaacagaatataaacaatcacacagtagcaaaattaagaattccacaaagagaatgaaatagaaatatttaaaaattaattttatttaaattagaaacaatcttattctacgtatcaattccagttccctctccctcccatcctccaatgtcccccaccaccaccccattcacttccatgagggatcatgaaaatctgtcatttggggcagggcttaggccttccccgtgcatctaggctaagagagtataactccatgggaaatgggctcctgaagtctgttcatgcactagggatacatcctggtttcactgccagaggccacatagactgactgcccagtcctcttagctgacacccatgttcaggaagcctggtttggtcctatgctggttccccagctgtcagactggggtccatgagtttccacttgctcaggtcagctgtttttgtgggttttcccagcgtggtcttgtcccatttgttcatcactcatccctctctacaactggattccaggagtttggctcagtacctagctgtgatactgcttctgcttccatcagctattggatgaaggctctaggatggcatttaaggtagtcatcattctcattataggtgaagggcatttaaaatagtccctctactattgcttagattcctagttggggtcatccttgtgaatctctgtacaattccctagtgccagatttctctttaaacctatgatgggtctctctattatggtatctcttttcttgctctcctctattcatcttctgactcaatcttcctgatctctcatgttctcctccccctccttttctccccttctctttctcctccctctctccccctcccccatgctcccaatttgttcaagagctcttggatctgaatattatcatgactaagttaaaatctgaacatgctcaatactgaagaagaatattgcgagttcaaaaactagaaagaaaaaaatgaaaaacactggagaaaacctacagaacaggaaagatactacaaaacaaatggacattatgcataataattccagtggatcaggaaaaggcaaaatgggtgaaagtttgtgtatggaaaatgatgaaagcctgtataaaactacccaaagactgaacaagtaaatccatcaatgttcaaaaagccttattaagttcaaaatgatcatcctaataataaaattctcaaaagtgagaaaaataaatttaaaattatctaaataaacaaacaactgtcttagttagggtttctattgctatgaagagacaccatggccacggaaactcttataaaggtaaacatttaattgaggttagcttacagctcagccatttagtcaattatcattttggagagaggatctgatgacatacaggatgacatgatgctggagaattgctgggaattctacatcttgatccatgaatatcaggaagagaatgaaatacaatggacctggcttaagcttctgagacctgacagcttgcctacagtgacatacttcctccaacaacaccacaccaactccaacaagaccacacctcccaatagttccaggtcctgtgagcctatagggccatttttgttctaattaccatacaaacaaatgcctcctatcatctgaaggaaacgtctgcgtattgtatattattgcgtattgtatattatatattttaatttagcagaaactgtccaaatcatatatttcagaccagtaaaggtctttttaaggaacaaagagtgctttggagagatcactttggtagtagagaccttgtgtattatgtatcatgcatacagccctatgtttgaacccggtaatacatgcgcgtgtgcgcgcgcgcacacacacacacacacacacacacacacacacacacacacacacacacacacgagaaataagcttttcttactgggaaaataaaagccaccatgagatagcatctctgctttcaatgcctgcaacaaaaatatagaaatcaacttcaagcagatttattttgtccacagttccagaggttctgtctttgtctcactgaatctatttccaagagccaataatgaggcaaaatatcctggcatttggaatacatgtcaggaaacagcacatctcatggcatccacaagcaaagaacaaaagaggaagggactagggacagttaaaatatgctttttaaaggtttgtaaaatgtaccaacatttcccatctatggtccccttcaaacagtccattcaattgtgaattaatcaatggattgatccattcatgagtcattatgctcctgatccattcaccttttaaaagtaccagtagctagtttggttcttggatttcaatatagagacccggggagaggacacattatggtccaatctataactctgtacttgttaaattggttattatcaaaagtcctggagaggtatgggggaaaggggccatcgtatatgctgtggtagaaatgttaatttatatagccacattaaaatattataaatcttatatggtcaggagagttatctatgatagttttgaattagtaagtttatgaaatatacagcaagccagagtaaaaagaaaaatagatatgtagatagatagatagatagatagatagatacatacatacatacatacatacatacataatacatacatacatagacaaataattggaaaggaaaatttgtcaagtcaaatacttaatgcatccagaagaacctgacttggaagttgagacaattgttggagttcccagttgagctttttctccatgtctgagctgcccacaactgaacttcagtcttctcttttccactgtaggcatttttatattgagagataaatagtcacctctgatggaaattgcttactttctagtctttctcaaggacatggtatttttaacatggattgatttactcttattttctctttctgtcacagagttaagggaaatagccaatcacagaataagggaccttggaggacactataagatgaacatgcttgggcatgaaatgggttgggggtatgaatccacttccagagcacatttctgagtgagttctaacaaaacataaaaactcatcattattaatgcatattacatttgtcccagaataatacttttcttgccataatttagcttattggttagctatctattactgtaagaccaaatttcaaaacatatctacatctagtttgtctaatgtacacatgccatatgtatacttctgtgttctcatctttacaatgaaatgatcaatgcttgtttttttgtacctatagatatatcaagaggattagttgaatttcagaaggaatgaagttattatgagatgcaaatttacaaaacaaattaaaagtggtcattattacttagaaaatacttcaagaaactaaaataaatttgcatcatataatttaatatctgtattcaaaaatatttgtattttggattccttaaacagctactcgccttccaagagaaaccatatttagggactcttggcagatttggaagtttgtattctaagtgccctattataaaaatatgagtcttttggaagtcacctcatgatatgcaaaaaagggagaagatatagtcagtgcagcatcagggctatgctgactgcattaataccatggctgatgattcagagataaacaaaacaatttttcccctccagactcagtgctgaacagaacagagaaccaaactctttgcttacgcttctcccttgttcatgctctcccttactgacccatgcctgagggatttcagtatttaagcatattaagatacagacatcaaaattgacacctaaacattattatctccatcagcaagcaaagccaggagacgtcagtactgtggcagcacccagagaatgttcagccatatctcccaatgtcatcagaaagtgtcagaaatttgcaatagttatttgttaaagaaagtacattagggatggagcacagttactcatacatattgttatctcagaaatcaactggttatggagacattgatggtgtgatatgcatgtgttcctagataacactgaaatggctgttgctttgaaagttatagaaatttcctctgactgctactgagacatccaaataagcatgtgtggtatatcaatattattgatattcaaggtcatttttccccaacacaccatacttagcagttaatagagaaaattccattgatgggatattagaatttcaggctttataacaatagtgatcattatttgggatatgagatcttggggcagatagaaacggttggggcatttggtagtaacagcaatttggtgaccacaggaaacacataaattaataatttatgggctagctctgaatttcttttctgtttttatagcaatgggtgatttattcagaattgaattattcagaaaactcaggtcaagtgttgtggaaaattattttaaggagtgttacatttgtttatgctatggagcatttgttttaatgatgcaaagatgtgtgcattcttttatgttgcatttgtttaactctatgaagctgtgttactttacctgtttaaaaaacctgatgatctgataaagagttgaagagtcaatagcaagacaggagaaaggataggtggctctggcaggtagagagaataaataggagaaatctgggaagagaggaaggatcaggatagaacaaggagaggaggacatcaggggccagccacccatggagtaagagtgaaactaagatatacagaagaaaagaaaaaagcccagaggcaaagaatattcgagatagtttaagaaaagctggcaagaaacaagccaagctaaggccaggcatcaaaagaaagaagaagactccatccatgttcatttacttgggagctgattggtaggccctcaaaaagttaagagtgaaagagtgaaaaaatatcaaccaacaactacaatcaagcactacgttgcaagtgttatataaactagtattttctggatattggagcacccttaaatttaagtgtttaaaaaaagagcaacatttatttgtttttataatctttggttcacaatatgggttgaacttcattgggcatttcatctcttcttggggcttgttgtttcatacatatatgctcagtttctagctcagctgaacctggttactactttagttaggatttctattgctgtgatcaaacagcatgccaaaaaagcaagttggggaggaaagggtttatttggcttatacttctacattgtagtccatcactgaaggaagccaggcaggcattcaaatagggcgggaacctggaggcaggaactgatgcagaggccatgtagggatgctgcttaccgacttgcttttcatgtctttctcagcctgttttcttatagaacccaggactaccagcccaaggatggaactactcacaatgtcctggtttcttccccatcaatcactaattaggaaaatgttttacagctggatcttatggaaacattttatcaattgaagtagtctcctttcagataactctagcttgtgtcaagttgacataaatctagcacagctgcctaagatgttttcagctgtgacagcaagctcctctgtgcggtttttaactctccagttgaggtggcccaggctgggtcataaaggcaagtctccaagggagcaagcagataagtaaaaagaaccatatcctgggattcagaacagatacattgctaagactctaaatcttagtgagtaaaaattaaaaggccagctttgattttaagggccatggactaagtttctatcttccatggaaagttacattataaattctgcagtattggcaaaaaaaaaaaatagccaggggttggtggtgcatgcctttaataccagcactcgggaggcagaggcaggctgatctctgtgagtttgaggccagcctggtctccagagcaagtgccaggatagattccaaagctacacagagaaaccctgtctggaaaaaacaaaaataaataaatgaataaaaaataaattctgtagtattggaaggaggacaattcagccattttcatagcctgttaaaactccttttaggctatgtctttgattcactagatctactaagaaattaccaactatttgttctaatgaccttccaagagtgaggacatagcaacgttccaataatagcccttcagaaatctcattaataaatgtgtcagagcacatgtcctctgatacagcaagaaataggttcaatgggttcgatatcatagaaaaaccaagagtttgaagatgaggccaagtattggaaagatcaattaccaggaaattatagcataagccagctggtgttcttgggcaacgaggaagaactgagcaggttgcaatatactcagaagcaagagccaggcttgatactgccatgcataattctcttttgaatctgcacaaaatgcttcatgcttatttcttatatttaatttccctgtaagtgaactaaaataaattgcagtgaagtgtaatgttttgaaataatcccatagttttcaagtgctcttgagcaatggaaagcaacagggctctgtgtacatttctccactgacttaacacttattgtttttgctgcctggaagagttccctttaattgatacttggcttgatatgcttttaaattattaaagattggaggcgctcattaagtaagagattaaaagacatggtagacacggctaattattaaaggcccaagaagggacatgaaatgcattttatctgaggctttagtggattgttaaagtaaatgaatggtttagtgataaaccagtcggagttaatcaattgagcaaaactatagggaagctatttgagtctagatttgaagggtttataagtgatcgtagtgagaggcttacagctgctcccgatttctttaatttagactgctgagctgctaattggccaggaaattgggcccaagctctggagctaatgttcactagtggaaggctactacttatgggtcattgtgaagaaagtctggttaccaaccattagtaggttagagtttgagtgatctgtgatttaaaggatgtcatgtttcactctggtggcaagtctttaaggaggccaattttcaacttcctgagttttccagcttctccagcagtccttgacttcccatagtgggaagtatcttatttttgctacttactaagagggaaagctggctgttgacatagccactgttggccagtgagattagtaacacgatacagagattttcgccacctaaaagtcactgcttcagcattggctcagataggtaatgactggaagctattctgacctgacagctgtttaaagtcccatttgaagggaactatttctcggtttgcccccagacaagggacatgtcactgcttggattgcaaaatgtcaactcagttggaattctgcatagcaataaggctcacagatgagtcatcaccaccaaggctaaagtaacatgttcctgagaattaggaacatttggctggcttttatgacagggatttgaaccctgtggaaaaataaatattgcattagtttcccgccccccaagtcaggcattctacttatatgattaaccagttcaagacaccagggtaccatctgatgtattactaagattgaccttggcttcagagaagacatacttaatgtccctttctcaaggactttaataattttttcagacctgcatgttctgtgttgttttgatcactatttaatgaatatattcgatcagaagtacagttcttctggtcacccccagagtacttaacacattaacaaagatggggttcattggttccccatccattgaggactgggtaatttccagctacatagaattaatggtgaaaagctcaatgttcaaatcccacaaacagcagagcaaagggcgatagtggaatggggtaacaatgagaggaatggaagacggcatactggctgacaaacaaacagctttagctcatgtgtacatgtacaggtcatactctaatacaagctttcaagtcactgaatgtagtctttcttctaaatgtgcacctgaagacatatcaagcagactctaatatgctttttatttcctttcttccaatgcatgccctttataagaaacagaataagttgtttctggctttatgttaaaccttacacttaaaagtgggcaaaggtttcacctgtggagtgaatttcccatgtccagcctttcaacattacggctgccagctgtgattgcattggctctttgggatattctggtcctgccccttgggcagtgcttcctggaaaagcagtacacatgcctgttgctctttttctctacaccatcactttgttgaaggtatgctgggagtatggtggtggacttttagtcatcttcgagcttctctgagcatggggtcaaatttctagtataaactattattgttattggttccatagttccaagtctgaggtaggaggatgactgattcatttgtctttgtatatggctcttaggtattgggaaaaaagaaaaagcatgtgctctaggcttcccaagataagatcttcgaagggaaatacacagtaaagccaaatgagcaaggagagcctttactggatgattctactgcattactcaggcaattagtggaaagagggtgacacccttgtctgggatgtcctctttccttataccgatggttcaggcaatttgttagactgaagggcaaagtgtttccttttttctttccttttcttctgtctgtccttcaacacttctttcatattttgttttctttgaaatatttttcctacctctattcaaatttaatgtaaagtcagacactagctattttgtttcttaggataggcatacactggatataatgacaatcccaagacaaaagaaagaaagattatgtaacaaaaggcaaattatgtcacaaaaggtccttgatgtatcttcaggcacataattagaagggtcacattcaatgacttgaaaccttacagttagggagatactccctgcacatctctttacttgcatgcagtagttttaagtagatttttgtcaccgtgtgccagtagcaattgacctctttgtattttgatgaaacatttatttttatctttcctgttgcatgtggatcattgatttgtaaaggagtctttatctgtttctcttagtagttcagaaagtattggaatgcaaaagtgagcttcttgagtgcatcactgcttcctcttccatacttcttaccatatctggattacacacacacacacacacacacacacacacacacacacacacacacacacacacaatctgctaaatacagtgaatttggggaaaatagtttcttctgagataccatcttactcccatcagaatggctaaaatcaaaaacaccaattgtaacttatgctggagagaatgtccagagggggccactcctctgtagggagacactgtagccacacttcctaggagctagctacacctgtgcttgaccacgcctgccagggcgtggtcaggggaggttcaggatgatgtgtggggagttctcaagggggctgtagacacgtggggaccccttctatctggcctccctagtttgctgcctctgggcacgctctggcttgtgcttggccagtattatttgaataaagatatcataacctgtaacttctcattatactcctccactgctggtgggagtgccaactcgtacaaccactttggaaatcagtatattgattcctcaggaaaatgggaatcagtctaccacaagatccagcaattctactcttaggtatataccccaaagaagcacattcatacaacaaggacatctgttcagctatgttcatagcagcattatttgtaattgccagaatctggaagcaacctagatgcccctcaactgaagaatggatagaaaaaatgtggtacatttgcacaatggagtactactcagtagaaaaaaaaaaagcaatggaatcttgattgatcaaattgatggatctagaagaaaccattctgagcaaggtaactcagtcacaaaaagacaaacatggtatgcactcaatcatatattgattttacacagagcaaaggattgtgtagcctacaatctacaccattaaagaagcaaggcagaaaggaggactataagagagacacacatggtgtcccagagaaggggaaagggacaagatctccttagcaaattgggagcatgggggcaggggagagggagctaggagaatgagaagggggagaataggaggggtgaggaggacataagggagcaggaaggttgtgtagtgggaagaacacaggagagcaacataagagataccaaatagagggagccattataggtttaaagagaaatcaggcactagggaaatgtccagagatctacaaggatgccatcaactaaccatctaagcaacagtggagaggctaccttaaatgccctctcctgataatgagattgacaactaacttatgtgccatcctagagccttcatccagcagctgatggaagtagaagcagatacccacagctaaactctgaattgaactggaatccagttgcagaggaggaggaatgatgagcaaaggggtcaagaccaggctggtgaaacccacaaaagcagctgacctgaacaatggggacctcttggtccccacagactgatctctgggaaactagcatggaattgatccagaccctatgaatgtgggtgtcagtgaggaggcctcggaaatctatggggcctcttgtagtagatcagtacttatccctagcataggaattgactttgggagcccatttcagagagagggatactctctcagcctagacacacgtgggggggcctaggacctatcacaagggatatgacagattctgaagtcccccatggacggctccactctccctggggagcagaaatggtatgggataggtaggatgttagtggggggaaggagaggcggggagggagaagaaactgggattgacatgtaaaacaatcttgtttctaattttaatagaaaatggagaaaaaataaaaaataaaaatttcagagagagcatatctcacgtttttgaaaaaaatgaagtttattttttgctaaaaaaataatctagcagtgggaattttaaatgtaccacagatctaataatgtaatgctcaaatgcctctaacagtgacagaaatttaacaatcttcatttggaagtaatagaatattgttagtttataagatggttgaggaactaaaaagttataatagacttgtaatgagttcagaatatatttctgtgatgaatccgtcttgaagtacttttagaaggtaaatgactgaacccattaagcctgatagaatgggatgacaggtgaatatttaggaagaatgctacaacatgggcaggttaacatcaaattcacctttgtacacacagctttgcaagttctccaaaatgtgaagtgtggagggtttgcttggttccatcctgttgggtctatgcaacaaattgttcttaagtggtttcagtgtcctaatgccttgctgctgtgtgctctgtcctgggtgactagcatatactcctctaacaactggtaggaaatgtagacccaagagcaatacccagggctttcaaacaatatctccattcatcaggtgtcctagtgtctgtctcctgtgtgcattaaagtaaacatcacaagtcttaatgtatactattgaaatatggactctgggggctggacagatggatcagtggttaagaacacttgcttctcttgtaagagacctgagtttagttcccagtatctatttggatggctcatagccacgtgaaactcaaactacaggtgatcttaccgcctttgctgtcttctgagggtacttgcacatacatggtgcatataatgctctcagccatacacagatacacatagcataaataagtaagtaaataaatatattttaaaatatacatgaattctgattatatatgactaataccatttaaacaaacaattgtcatgtttttttttttccaagaaagaaaaacatacatatttaacaaaacagctttctaaatgtctttcactcaagcacagtctgtcttgggaaattagtttatatcttctggaatttattgtgcaactgacagaagcaaatgatgaaaaagaaaattgaattccaggttaaaagaaattctttttgttctatgtcgaaatgacttttcaatgcaaaattttaaaaaataggaatgactttgcaaattgagtggtgacttttgctgaagtattttcatctgcccaagttgtgttctcaggtcagcacactagagtgttgaggttcagaggaaaccctggctaaggggtgtcccagtggatacaatcattatgaaaaagggaaaagtgccaatgtccttttagaattgtgcttttgattgatgggtcatgttgaaaaccataaccatcacactttttcatatgttgtcaaactctgtttcatttcagccttttcttgtcttctgtttatgtcatgctttagtgtgtgaggggggaagtatgctaggaaaagaatgaaaatgaaacctcaaagaggcattgtcgggaggaaagcttccgtcagctgcttgccttccttccttccttccttccttccttccttccttccttccttccttccttccttccttcccttctttctttctttttcatgttttttttttcttttaaaaaacccatggttcctgtttgttgaaggaatttgggccctgtgattctaagtcttgctgctgagggtcaacacaattgctcagactagtctgagagatcctttagactctctacaaagaatcaaaccaatggtgctaaatctcctttattgtggtttaggtctgctaccattccctgccagctccaaggttctgggcctttctcccctaatcatccttatgtcagtaaaacatgtgaaatcttggagcttcacatcccactaatatctgcatccaactccatctaagtgcaccaatggcagtttagtgaggagctgctctggaaggtgatagctttatcgagtgtcatgcagcaaagtatacatttcctggcatgacctctccttctttccacccaggtttcagagaatatcacatctacttatgtatctgggaagttgcgctttctacggacagttattactgtgttcattttttttctaaatgaccttaattttccccatcttccctgtcacactaacacctgaagcactcagaaataaaatccctcccaacacacccagcagcttgtcatgccttctgtttgcatttttgactgcctggaaattaattaagagatgttgatttcaaaatgcttctttttctaagtttctcaaatatttaaacaaattttatacaccttttttcacttcccctttctctctatttgtaataagattaattatgtgaggtgcactgctgcttatccccatgaaggaaaatctaaaacgagggatttcagcctcaagaaggctattttgtcctgtttccgatgttctaaagggattaatttaccatatcgtatagccctggaagactgtgataattgaaaacatccatattcattgcatgttcaaagggatctgtctgactttgtaatgtaaaaagtgcatttttaacctgaacggggacctgcatctgctattgcttaatcctattagtcggacatttccaaagctttagtgtataatcattagctcgtgttaatcctgagacatgcctccagcttctgcctgtcagaaggaatccctgcagggaaatgtggaggtgctgatagcacagcaccaactaatcttatcttaaatgctagcagaagcctctatctgtgagagccagggaattaaaaacacatttttatgggtattggatagcacggttctctctctctctctctctctctctctctctctctctctctctctgtctgtctttctgtctctctctctttctgcctctctctctccctccctccctctctccctcctttctgtgctcttcttttccaccattctttgttatgtggtgtagtgagtactgtgcaaaagggtggaaagggggacctgtttaggtctctgatgcagcagaggaggttcctcgttaaatcactcaggatacttgtcaggtcttctatcattttcattccttgacgtcagagagtgaaaccaatcctgtgctttgtgccgctgtgggttgtaaagatgacaagatgtatcttaagtttattgtccctcccatctcatggcccctggagactctaaactatggagacctaagtagagaggaaaattgccacagaccactaacatgggagagttttcaagatggagttgaaaagggccaggagcaatagggttcaagagaatatgtgggtttggttctgtaagagggggctgcataaatgtgacaagtgagcttatagctgtgcatttcagatcacagtagactgtaaggaagctcctcgattttacatggagattttgacaaaggatgtcagaatatttcttcattgataatacattttaatgtggcaatcactatgtgctagtcgccggggtttctacaacaaataaatgccctgcccttacagaatcagagtagctatcttgatacacttgggaaaccagtgaacaaagaagaaatagtaatgaaaatgattacacagggtggcaattgctaagatgctgttttctaattttattgttcaagtcttttttttttttccagtttcttcataagataagcctggccattggtaacatgcctctaagacagttgagagtttcctggatcaccctttcctatagcttagtacttcctttaaaaccttaaagcagccagggggctacaccttgtctccacctgtctaagattacccttgattaactaaacattatgatatgatttctaatactgtgcttttgtgagacctttcctgggaaataatgaacgaatgtctgatcaccttagataggacactgtgtcaaaactatgggaagattagagtccaatttattgaactgaagtttaccgaggttacagctctgtagatgaggtgttacttacagagtagagatgactcaaaagcagtgtgtcacctaacagccttctccatcataagggatgtgaggaataaggaactcccccactgataacaatgaccactggagacttggagtagctaaacaaggcactttattttattttatggccaatccagataaagtggtgcaacaagggagggcaaagacagtgtttataaccgtgaatgcaggtcccttccttctttgcatcattggaaatcagaataggacaacctgcatttatcttttcccacttacgtctgtctactttttagtaaagactacctgcagtttacatctatgtttaacaggctgttgacttttaagctttcagctgcacgagcttgtatgcaggtctttaggcaaacttgactcttaataattttctactctaaaggttttgggggtgtccagactagcaggtgttagcaggagtcaggggttttatgcttatctgtaccaggacctcaaaggactcaaggcattcttgccttgaaaatggaacttaaaaaaacattttataggtaatgacttgaagaaaacagaatcttcggagttttctacaggagtctcaggcagctcggtgagttagtttggagtgtctccattccaaaacaagtgtcaggaagtctccgaaacctgtaaattgtttccttcctgaaggatgccccttccaggatggaatgcttcaatacagaggaaactgtcacacaacagtggtggagacactagcaaatgataattgaataataagactttcaaatctcttctctctctctctctctctctctctctctctctctctctctctgagaagagaagagagcagaagtgctaagaaagcagaaaggctgggatagatgaacttttcaaggacaaatctttggtgagttaattcctccaatgaggccccatcttctatggttctatcacatcactatagtcatttccccatttgactccatcaatggattacatcattgattaagtcagagaatttctgatctattatccctggacatgccctcatagaaatgcctgagtctcctaggtgcctcacaatcctttgaagttcacattcatgctagattaagcagcatacatccattgtattttcaacattgatatgaataaattgttttaaatatttctccagacaaatgttttgtaaagtaatgttgtttcacaaagaattttaataacttacatgtcttgcttcctacagggcacaatatgcaataatggcattcattagtagactgatacagaatttataaaaagtcattcttggttgaattaacacagattttatatacgtttaggaataatcttatttttaaaaatcagaacttggtcaatgtcttctgaaattttttccttaaaaaatcctcttttttccttaaggaattgcctgcccttagtgaagatcttaggcttcattgtcacagtggaaaagatattagaaatagctttcaaagaagctttaccttgcctttctcatttaataatgaagtacttactatatttgccttcgagttatcacatagcctgacttgctttctttcttttggcctcactacttctatgaagagaaatttagttgctgagaagtgttaccaaataggaagggctgtgagaggagcccttatttcctcctcagtgagtttcctgtgagctcaactttcaccactctggaaaatataatgcaatgtttctttttcaaaatgatctagtttattcctcattatgggcttttgttgtgaaattttagtttaagatgtgttacaattgtttattctgtggaatatttgtttaatggtgcaaagatttgttgcattctttcatgttgcatttgtttaactctgtaaagctgtgttactttgcctgtcttaaagacctgattgatttaataaagagctgaatggccattagctaagcaggagagagggataggtagagctgtcaggaagagacaatacataggagaaatctagcctcaagcaaagaggaaggaacagagaaaggagaaagggacaagagggaccaggcacccaactacacagccagccacaagataagaatgaaagaaaattatataaagagaggtaaaaagcctagaggcaaaacatagttgaagggaaatgggataatttaagttagaaaagctgactagaaacaacttatttataagtaagaataagtctccatgtatttatttgggagatggttgcaagactcccaagagaaaaaaaattatagatttcttgagctatgtaaaacccggcacaattaaagggtttctaatgtcagttctgtactggatccggaaaggcattgcaaagactaatttgggcagggcaatgtctcagttgtcaagcatgcttgatgctgttgcagaagacagggatttggttactattacctgtgtcccggggctcacaactagcctataactccagtgccaggggatctgatgccccccttttttgtctcagtgagcactcacatacatatggcatatatcctcatacacaaaagtaaaaataaaaataaattatatttagaagactacaaatgtaggtataagtttgtgtaaggtatacattgtgagtagataataacccacaatgaatgaatgaatgaatgaatgaacagatagatttaaagtaccttccaaaattgtgtgagtattatttcctaattctgctgttaggtggaaataaacagtggcttctaaacagtccctccgtggatcctgtggaaagcactaggagtgagaagaattttcttcccctttaaagaaaaaacaaacaaacaaaaaaaaacagagaaacattatttgaggagttccagggcacatacctgagtgataattttgtgaagcatcaagacacaacatggtagatgtttgtggaagagagagtgttgcctaccaaattctgcatccgttgtctgtatttcccattctggttgcaatgaggaatgggtcattaaagggaaacatgagtacatgtgtgtcatttgcaaagtgaaaagcctatgcactattacgaatctctccctcttcccacaatgcatcacctgaaaaggccacatgtttcagatatctagtggcaggacagtggggaattctgcccagcccctggcatggtgcctttcttgtatccccagaaaacccaggttattcagtgtggctgaaaaattctaaacactgagattttctggactctagggcttaaggaattcaggaatcattaacaaaatgaccctgactgataaggacttctctctatatcaaatgactctgcatactttttggaaatcatgtgaaaaaggcagctgtttgtagctatcaaatccctccctcttgagccaagtcttttgaaagaaagcctacaaggcagtgaggacaagctccatttgcttggtgttcaagggaaatgtcttgttgatatcctttcttgacctgaaggaaataattggactttattaacttgctgttaattcatcctttcttcagtctccataattcttaggttaattagaaaagttttctgtttttgtgtggctagttatggagaaaatggaatgcactcgattaaattttcagatttgcaaatattagagagtggcaaattacttaagatgcctttaaaagtcaagagcccctgtgaaaaatatggcagtaactttccaaatactgtgttgtaactggtagatgctgctagggcaacaaaatttatcagtcctatatatacctggctatatgagttgttcattaaaagattgaataatgtagaatgattgcttctggctacatatatatctggctgtgttttacaaatacaataatttgagactgataccagaagaactgaataaaaatgtctgagttattataatatccagctagggttgagaaccactgttgaaatgaacaacagtgagaattggagttttgattgcttttattagttacatgtgtaatatgtaaaacatccagtctctatgcatttgagttttcatccttatgcacgagggggtcctatctcgttctgtttagtctaaagtacacttcaaattcaaatcgcaagcatggcagctgacagataatgtccttctctaccgaggcatcggaacagtagtggccttgccacacttacaacctttgtgagttgactccttcccacttcactctaggtctctactcttttcagaagtgtatgcctagttcaagactccacagaaggcaaagacaggagctgggtaccacagtaggctgtttcacactctgcaactggatccaggtttgactcttgtctccactatttctagtagttcagttgggtaattatatgaattttagattaatcttgattctctatcaccaaacatttgattagagcaggaaagatcagcatacaaaaagaaaactttcttcctccaaaagcttatatcccagaatggaagactaataaacaagatgcaataattttcttttcagttttgttctgtagttcagccagtaagcagtaatgaatattgtcacagctatagataagcctgggctcagcgacacagccatcagtcttagcagaatgagctcatctagccctttctgcccctggttcattctgcctgtgctgaaggacagcagggagttaaacagtcttggaaagcctgtccttgacctcagccatccctgttgttggatttcttttaaatctagtctatggttttgagtttcctccatgactgacggtataattctagaccatgatttcagagttcatgctagccagcaacaccttggcctcctgggattctatccaaccaaaacccctgggagctgtcccagataccttcagggctttcctggtctttttggggaatgacttttgacccagaacttgttccaagatgagaagtaagcagaggtttttctgaacattaacacattaaccacctctcctaataatggcctccatgacagatttaatatgaaaaaaatggattttaaaaacacttaaatcagaattttcaccatgaaacaagaaaaagataccttctgaccatttattttaaaatgaaacataagtgatcctggctactaatatttactaatgacattctactgtgcaaacaggattctctgccaagccagatttggaatttgcttgttttcttaaaaaaaaaatctagaggtgttcatagcttaaacaaagcaaatgtaaaaataagtaagtgtttcaaaaaaatctctcctataagagacttaactcataccttaaatacagaagaggcacttgtttctgatttcttctatgtgtaagcctaatgtcaagtgtgcccatgtgcttgtactgtaaacatgcctggcgtcactatcaactaaacagtgatggtctagaaagagctgggtcaagggactcttcttccaatgtgactaatgatgaatgcaccgaggtcaatcatctggtgcaggttctgggcagtttcaaagagaaggcttgcctgtatgaaaccaccaaccacaatgccactctctttacttccttcatgtacgagaggctttctaaaaagacagcaggctaagcactttaggtctgtgatatttgatgaatattctgtgctagtcataacttcggccaggctccaaaatttctaagcctcctgtacacttctttgtaaaatgagctttagtaaaggggcttatcagagagtcctgccactgtcctgaggtgatgtctaatggccctgacctcactttagcttcatcctgcttgattaattcacctggaccataccctttcctgtagtaattctctacataactcccattctgatccttagttttaaatgtctcctgtccatgctgtgtttttagattggatcctatctttctccctcactgtacgatcctgtgacagatgtccttgcacccatcatgaaggtcctgaacaaagtcttcctgattctgctttggtatacatcaccaaatatgttttttgttagcatgtacatgtggtgaggtaatcacaatagctcatttctaggtcacaaacatttgaatcaatccagtggcatttgaatttgaatcaatccaatggcatttggttgaggatattccccatttctccatgctcatttttcttttttttccagagagcccttcccttctccattccccctcctctgctattctttcctctgctctcttgtctctgctcatgacaagaaggagtacctcccctggaccaattcatcaagtcatgacaccaggagagcctcattccctctgacagttgtcaatttaaaaggcaagagaagatttcaatgcgggggtgagggacgtgaatggcattagtcatcattaccctgaagcgacaagggtttgctgtagctgtaccctcatcagacgtctcatgactatgccctgaggatcacccccatcactctaaatagtcatgacacagccaatgtataggttaaaatgatgagcaagagagacaggcctatcccaaagtaaatagcctgaattagaggcattacaacagttaatatgtcaggtccctgctgggagaccatagatcctgtgtggtctgcttcccctgaatattgaaattgattgtgcctcgggcaacagaaaggctggtgggggagggggagcagtgaattcatccttccagtcacatggatcaaagagagcagatagtgttatgtggaattatatgctctgaaggtgcaggaaatagaatttaatagagagatggaatatagtaaaagcagccctgagtcttagccagtgtctccccaggccacactatccaaggagcataaattcggtcatgctcccacccaaatcacatttctctggcaaagctttaacttacaccactttcttcctctacttgccaactgtttttaggagccttcaggggttgcttcccatgtatttaaacacagtgctctaggaaaccacaactgaaattttccatcccttctgcttaccttggagatatatagcagactataataacaactcttgagctattcttcagtgccaaatataaaagacatcattggcactacgatgccactggcactgccacattgctttgaatgttaccaggtattgtattattgtttaagtgtgtggattaaagctaggacacccaactggttccttcttaaatgtggagaaattctgatcttataatgatttcagttgaattgtttctattcccccattctccagatgccaacttagaagttatgtttctgaagccataataatgggtacagaagatcacaagggtggctgttttttcttggcttagactctcctaaaacaagttcgtaagccaatatatgcaggttgacagtccatgcaagagaggattcatttggaaatgaggcagggtaaaaggagaggtaaatggataccacttgagggggataaagctgaaggactgggcagatggacaaggtaaacctctgtgactgatgctgttttacaagaaactggtgagatgtggagctgcattggtccttctgagttgcttgcagctgagctgagaaaaaaaggtttgtctcacatcctactgacatcaatatgcattgtcccttagcagggatggaaacaagggggtgattttcttcaactaatgattagtccaaaaaaacattcatctggtctacagcctactctttgtgcacatggaagaataagtgtcttggtcttgaacaggaatctggttaaggtgcatggaagctctctgactctccttttgcacataggcataatttcactcactgacataccccatcgcccctttccatctttcttcctcctactgaaatttttcttcttcctcccaataaatcctcctcagggaaaggtttgcctcatgggattcacacttatctaggtataagtatgtagtactttggtctttaaatgtaaaccgttttgatggataataggtaaaaatgcatgattataattaagaatcttagttagatgatattttatattgacaatcttagccaaaactgtaataatataccagtcagagggaacaacacattctagtaaaaaaaatctatccttgtctcccagtactgtcgtaagtacctactttgacagagtgactctgaggtgaaaacaaacaaacaacaaaaaaacacaattctgaaaactcagttttaacaaagatcacgatgtcaaagtgttctctgaaaagggctaattagagcaagagtgcctagccttctagtgcaaggcttctggtgactaaatagtgttctgtataatcatgtattttgaacatttatttcacctgtgaaaaattaacactaatagtagaaagtgtaataatattaatatggatttcattagtagtatctgcaattctcaactaaagattctaattatgattatcaattagtcctttcactgattttaattctaaaccgctgagaaagaagaactccagagagggttattcaaatgtgtctgcacatcagcacattgtactgatctataacatacattcataagcatgaaatagctgtgactttctgttttccattcatataaaagtacaaataccctttgttttggattcttattgcatgtgtatgtataattcagtacactgatgctgctgaagattgtgataacaaggctcattagaaacatcttcattataggaaatttcttccttgagattagttcatgtactgccccttgaaattaatacatatactgcccaagctcagatccttcctgcacagattagtgtctgttcctgatgaactgccatggtctttatgtttatgacaaaagcattacacatctgcatttataaaaactccaaagaaacccaaacccagacatctgttattcttatctacattttgcttttatcctttctatttttgctttttaaaggagattcaagtaattttatcatcacctcttttattattttatggttcatttacctcaaagacaagtttaaacctaaaatggaaggagaagtgaacatgtcctgaatagatacagagtgtataacttccttctcttagtactgctcacaaaacaacaaccaagaaacttactagaaaacctcagacgttccagagtatgcattaagaataaggggagctacttagggtcaacatgaggaaggagcactctcagagttcctttgagaacacacatccagttgaggtaccagaacataaacaaaattgaactcttcaggagataaatgttcagcttttaggattggaactttatctcaggtgaaacagagtatgagatgggtggatgtgtagggttaaaaggacagagaacaaaattaaagccatatgtggctaacagcaatgaatttatgggaaagttatttgttatagcaatggaatattcagattaacattcctccaatctcagaaacaaaccataaagtaacatatgtttctaggcaaaatattagaaggtgttataaagaacagtcaccaacaattcaggcagtacaagaacagggcacaacagctgctgatcttttgaaggcaccaacagcccttcctttaaaataattgactgacaaatatgtatgggttgcacaatggcctttaaaaacagagaaactgaaagtcttagaacaactggtacaagaacagctaaaagctcagaatattgaagagttaaccagtacatggaattctcctgtatttgttattataaagaaatctggaaaatggagaatggtaacagatctaagagctgttaataggtgattcagccaatgggttctctacagcctggaattcctttgccttctctattatctaaagggttattgatataaaagatagtttcttcagtataccttcatgagaaaaagaaaatttgccttaacagtgcctacttacaataattctcggcctattaagagatatcaatggaaggttctctacagggaatgttaaatagccccatgttgggtgccagatgtaccatgagttctaattggtcttaacaataaaaacccagtagtgctcttacctctacaaaatcctcagaccaaaaagaggcagagctcctgtctcctcccaatttatatttctctctctacccaaccatatcacttcctgtctgcctgtagagacctccagacctttatggtgactagctctgctctctgatcttcaggcaagctttatttgttagattagttttccttgctaccaaattcagaaaaaaaaaactcactaagaggtgtaaagtgtacaaggttgagagacgttacaagatagctttagtaatataagttaagatagaaagtgaacaatttggactatgcaagataggatagataatggattattttctctgaatttgtcaattttttattagctttttattttctttttttattagttcaaattaggaacaagcttgtttcacatgtcaatcccttctcccttctctcccccacccttcccccatccctgacatatccccccaccccatccaccctccattccccaggcagggtagggccctcgacaggggctccccacagtccactacatcatcctgggcctggcctaggcccttccacatgtgtccaggccaagagtgcatccctttatgtgggatgggctctcaaagttccttcttacaacagggaaaaatactaatcctctaccaggggccccctagactgcagaggcctcctcattgacatccatattcagggatctggatcagttccgagctggcctcccagacagcagtctggggtcaatgtgttcccccttgttcaggccagctgtttctgggggtttcactatccttgtcccgacccctttgatcttcattccttcctctctgtaattaggttccagagttcagttcagtgtatatgtgtgtatgtctgcctctgcttccatcagccactgagggctctaggatggcataaaaagtagtgaacagtctcattataggggaagggcatttaggttttcctctccaccattgcctagattgtgagttcgtgtcatccttgtaggtctctggaaatctccctaatgccagatctctccttgggcctataatggctccctctgatatggtatctctcatcctgctctcctctatagttcccacaactcaatatttctgctccttcatttcctcctctcctctcctcttctcctcctctcattctggcagctccctctcccctaccctcatgttcccaattagctcaggagttcctgccccttcccattcctggggtccatgcatttttcccttagagtacttcttttatcctagtttctttggtgaagaggattgtaggctggtaattctttgccctttgtctaaaattctcatataagtgagtacatatcaattttgtctttttgtgactgggttacctcattgaggatggtttcttctagttccattcatttgcctacaaatttcaagattccattgctttttttctgctgagtagtactccattgtataaatgtaccacattttctctatccattcttcaattgaggggcatctaggttgcttccagggtctggctattacaaattatgttgctatgagcatggttgaacatatgtccttgttgtatgaacatgcattattcgggcatatgcccaagaaaggaattgctggatcttgtggtagactgattcacatttttttgagcaactgccatactgatttccaaagtggtcttacaagtttgcactcccaccaacaatggaggagtgttcctttttctccgcatcctctccagcatagattgtcattggtgtttttgattttagccattctgacaggtgtgaggtggtatctcagagttgttttgagttgcatttctctgatggccaaggattttgagcactttcttaagtgtgtttcagccatttcagattcctctgttgagaattctctatttagttctgtaccccactttttaatttcattgtttggtgttttggtggctagcttcttgagttcattgtatattttggagatagccctctgtcggatgtggggttggtgaagaccttttcccattctatgggctgtcattttgccctattgactgtgtcctttgtcttgctgaagcttctcagtttcaggagatcccatttattaattgcagttctcaatgtctgtgctactggcgtaatgttcaggaagcggtctcctgtgccaattcgttcaagggtatctcccactccctcttctggaagattcagtgtggctggatttatggtgagatatttgatccatttgcacttaagttttatgcatggtgacagatatggatctatctgcaatcttctgcatgtctgagcccagttgtgccagcaacatttgttgaagatgctatgtttcttccattgtatagatttagcatctttgtcaaaaataaggtgttcataggtgtgtgggttaatatcaggattttcatttcgattcaattggtctatctgtctatttttgtgccaataccaagctgttttcagaactatggccctataatacagcttgaagtcagggatggtgatacctccggaagatcctttattgtacagagttgttctggctattctgggttttttgtttttacatataaagttgagaattgttctttcaagatctgtgaagaactgtcttgggatgttgagggcgattgccttgaatctgtagattacttttggcaagattgccatttttactatgttgattctacctacccaagagcatgggagatctttccattttatggtatcttctttaatttctttctttaaagactcaaagttcttactgtacaggtctgtcacttttttgttagtgttaccccaagatattttatgttgcttgtggatattgtgaagggtgatgtttctctgatttctttcttattggatttatcatctgtgtatagtatgggtactgattttttttaagttaatttgtattctgctactttgatgaaggtgtttatcagctgtaggagttctctgatagaggtttttgggtcactcatgtagactgtcttatcatctgcaaatagtgaaagtttgacttcttcttttccaatttgtatcctttgatctctatttcttggcttattgctctagctagaactttaagtacaatattgaagagatatgctgagtgtggacaatcttgtcttgttcctgattttagaggaatcgctttgagtttctctccatttattttgatgttggctgttggtttggtgtatattgcttttatcatgtttagatatgttcctgttattcctgttctctccaagatctttatcatgaagggatgttggattttgtcaaaggctttttcagcatctagtgagataatcatgtgttttttctttttcagtttgtttatatggtggattacattgatataatttcatatgttgaaccatccttgcatccctggaatgaagcctacttgatcaaagtggatgatttttctgatgtgttcttggattcgattcgccaatattttgttgagtaattttgcatcgatgttcatgagggatattggtctgtagttctcttttttagttgcatctttgtgtggcttgggtatcaaagtgattgtagcctcgtgaaaagagtttagcaatgtcccttctgcctcttttgtgttgagcaatttgaggagtattggtaatagctcttgtttgagtttctggtagaattctgcagtgaagccatctggcctttttttttttttttttttttttttctttcttttttggttggaaggcttttgatgaccatttctctttcattaggggttataggtcgatttaaactgcttatctgttcttggtttaatttaagtgatatctatccagaaaattgtccatttcctttagatttttgaattttgtggagtacaggttttcaaagtatgacgtgatgattctctggatttcctcagtgtccgattgttatatctcccttttgtttctgattttgttaattagcatgctctctctctgccttttggttagttggatacagggttgtctatcttgttgatcatctcaaagagccaactctttgtttcattgattctttgtaatgttttcctagtttctactttattgatttcagccattagtttgattatttcctggcatctactcttctgtggtgagtttgcttctttttgctctaaagatttcagttgttctgtgaattctctagtgtgacttttctccagtttcttcacgtgggcgcttagtgctatgaactttccccttaacactgctttcagagtgtcccataagtttggatatgttgtgtctacattctcattaaattgtaggaagtctttctttttttatttcttcctcaacccaggaatggtgtaattgggtgttattcaatttccttgagtttgtaggttttctgcaatttgtattgcttttgaattctaactttaaagcatggtgatctgataagatacagggggttatttcaattcttttgttttcttttgtggaggtttgctttgttgccaactatgaggtcaattttagagaaggtgccatgtggtgctgagaagaaggaatcttcttttgtttttgggtggaatgttttatagatatctgttaaacccagttgggtcataatttctgttagatccttcatttctttgttaattttctgcttggtggtcctgtctagtggtgaaagggggtgttgaagtctcctactataagtgtgtgttgttttatgtgtggtttgagctttagcaatgtttcttttacaaatgtgggtgccttcgtatttggggcatagatgttcaggattgagacttcatcttgatggacttgtcctgtgatgagtatgaaatgcccttcttcatctcttttgattgattttagtttgaagtctaatttgttagatattaggattgccacaccagcttgtttcttgggcccatttgattggaaatcttttcccaaccctttactctgaggtaatgcctgtctttgaagttggtgtgtgtttcttgtatacagtagaaggttggattctgtcttcgtatgcattatgttagcctgtatcattttatgggcaggttaagaccattgacattgagggatattaatgcccattgattgttggttcttgtttgttttggatttattgttggtagggtccttgtgtatgaatttgccctcctgtttcttttcctgtttagtaaatttggattatctattacctatgtttttgtgagtgtagttatgttcgttgggttggagttttccttccagaactttctgtagtgctggatttgtggatatgtattgcttatgtctggttttgtcatgggatatcttattttctccatctatagtgattgaaagttttgctgggttcagtagtctgggttggtatcccatgctcccatagtgtttgtaggatatctatccaggaccttctggctttcaaagttttcattgagaagtcaggtgtgattctgataggtctgcctttatatgttacttggcctttttcctttgctgctcttaatattttctctttattctgtaggtttggcattttaattattatgtgtcgaggggacttcattttgtggtccagtctgtttggtgttctgtaagctccttgtactttcataggcatatccttctgtggtttggggaagttttcttcaatatttttgttgaatatgttttctgtatctttgagctgtatttcctcaccttcttctatacctattattcttaggttcggccttttcacggtgttccatatttcctggatattttgtgttagcgatttgttggacttgagattttctttggtcgatgtctgtatatcctctagtgagtcttcaacaactgagattctctcttccatctcttgaattctatgggttatactcacatctttagttcctgatcatttatccagcctttctatttccagcatcccctggtactgtgttttctttattgtgtctatttcagctttcatgccttgaactgttttgagtgcttccttcacttgtctggttgttttttcttggctctgtttagattctttaagagaatttttaattcttaatttttttttgatttgtcttttcctccatcttttgtgattttttgcttgtttttttcgcctatttctttaagagattttcttctttcctctttaaaggactctgtaggggaagctgtagccatgcctagttaggggctggctacaggtgtgtctgacctggccttcgagggcatggtcagggtgatttagagtgagaggttcagatggctggttcacttttgttttctttttggcttgctgtacagactgctgccatgctggctggctaggttgctctgtaagtaagacttttccctattaagtacccttatatttctacttggctctgtattggtaatttcccacattatctggtgtcaggagtgggatgttggccccatttgggacagcctgccagtccccccaccccgccttttaattcgggaaaagctagccacaatgtacaaaaccacaccagatgtcatctttgtgttcagattcagaacccactttggttgcggcaaaacaactggctttggcatgatctatgattctctaggttatgcaaagaagaatgagcccaaacacagacttgcaagacatggcctttatgagaagaaaaagacatcctgaaaacaacgaaagtgaaccagccacctgaacctctcactctacgtcaccttgaccacaccctcacaggagtgctgagacatacctgtagccagcccctaactaggcgtggctaaagctttccctacaggactctatcatcttcctaagataatttttgaggtccatctcttcttcatcctctttgttgggcttttcagatcttgctggtgtggactccttagattcttgtggtgttatattggtctttctgttgttgggtgtgttcttactctttcttcttcctatctcttcttccagtgagtgcatgtggggtatctccctctcgcaggtggctggcagagggctcagcctctggccgcagcctgatggcagagggcagtgggtgcacaagggtggggtgtgtcgggactcagggtgggccttccctgtctgggcaggtccattcttgtctggggaggggtgcttaggcagaagcaagcaggggttgatggggcagatggggggagcagtgcagcacctagactcacctgaggctcaggcacccgccgcaggacagagggcagagtgcagacaggggtgaggtgtgtccagacttagggtgggagttctgaatttgtcaattgttaatggactaggcattattgatgtatttattgtctgtatatattatatatagttactatacttattgtatatagttttacttatattacaaacttttttattttagacaaaaagtggaaatgtggtgatattttgtttgtactctaacaaataaagcttgcctaaagatcaaagggcagagctagccactagttaaccatagagatccagaggactgttatggataggtaggaagtgatatggctgagtggatagaggaatataatgcagaagcagacagaaaccggcctcttcttggtctcaggattttgtagatgtaagaattctagtggctggctgctctgctttctaatctttcagctttcacccctaagatatgactctgggtttttattattaagaccaactagaactagtgctgcagatgcctcccctattttaagaaatagaaagaatataaagttagtagatggagaggtgggggaagatctgaaagaagttgggggatgggaaaatatataatcaaaatatagtgcatgaaattctcaaagaataaaccaaaacaaccttttttgattaattttcatttaaattaaaaaaatcatcccattttaataccaatttcagttccctccccctcccatcctccttttcctcccaccatctccccatccaccaacctatccactcctcagggagagagggtgaagccttccatgggggaatcatcaaagtctatcccatcatttggagcaggccctaggccctcccctctgtatttaggctgagagagtatcctgccatagggtatgggctcccaaagtctgataaatattggttctactgccagaggccccatagactgagcaagccctgcaactgacacctacattcagggggcattgttcagtcctatactggttccccaactgtcagactggggcccatgagcttccacttgctcggttcagctgtttctgtgggtttccccagcatgatcttgacccccttgctcatcactactccctctctgcaactgaataccaggagttcgactcagtgtttagctgtgaatctctgcttctgcttctatcagctactggatgaaggctctaggatgacatttaaggtagtcgttaatctcactataggggaagggcatttaaggtagcctctccactattgcttagattcttagttggggtcatccttgtggattactggaaatttctctagtgccaggtttctcgttaagtccataagggttcccgctattaaggtatctctttctttgctctcctctgttcttcccccaactccaccttcctgatccctcatgttctcctccacccttctgttctcccttcctctttctcctccctccctccactcccccatgctccaaatttacttaggatatcttgtccctttccccttctcaggggggtccatgtatgtctctcttagggtcctcctcgtttcctagcttctctggggttgtggattgtaggctggctattctttgctctatatctaatatccatttatgagtgagtatatactatgtttgtctttctgtgtctgggttacctcactcaggactgtttcttctagttccatccatttgcatgtgaatttcaaaatgtcattgcaaagcaatatttgtaaaatacataaatttaaatgaaaatcttccagttgaagttatgaccatgcctgtaatctagaactcaagatgctgtggcaggaggattgtgaatttcatacctacctggctacagtcagaaaatttttgttccaaagtaaatgaataaagaaacaaattaagactgtgggagtctgaacttccaattaatacattgaggttgtaaattatcctaaattatatgattgtattctctttatgagagacataattatggaagatataaaaaaagagacataaaaagagcactgaagtaattacatactgcagcctagtctatgttttcaccttctcaagtatcatatcagtgtcaaaatatgatgtaaatatttggtggttttttctaaataaattcagctatacatatattatgtgaagcatttgttttccataattgccatgatatgcttactattctgcaactgtttatactatgtcatagatatttttatagtttagtacatatatgcaacaattttaattattaagaatatgtttaattggtattactatagttcacttaccaatctgatggccacttagttgccttcctcaaattttctgttttcacaaacgtgatatgtactcactcctatgtggattttagacatagagtaaaggaataccagcctacaatccacactgctagagaagctagtaaacaagtaggaccctaagagagacatacttggtcccctggagcagggggaaaggacaagatctcctgagcaaattgggagcaagggaggaggggggagggagctagcagaatgataagggaagaagaggaggggtgaggaggacataagggagcagaaaggttgagtcaggggaagaagagaagaaaacaagaaaggagatactataatagagggagacattttaggtttaaagagaaatcaggcactagggaaaggtctgtagatctacaaagatgataccaactaacaatccaagcaacagaggagaggctgccttaaatgccctcccctgataatgagattgatgactgacttatatgccaccctatagccttcatccagcagctggtggaagtagaagcagacacccacagctaatcactgaactgaactggaatccagttgcagagaagaatgagtgatggacaaagaagtccagaccaggctggtgaaacccacagaaacagctgatctgaacaaggtggaggtcttgttccccagactgataccagcatgggactgatccagaccccaggaacgtgggcttcagtgaggagacttcggaaatctaagggacctcctgtggtagttcagtacttatccttagcataggagcccaatccacatagaggaatactccctgaaccaagacacatggaggtgggcataggccctatcccgaaggatacgacggactctgatgacctcctatggaaggcctcacccttcctggggagcagaaaggatatgtggtaggtagaggtggggggatggtcggggaagaagggagggagagggaactgggattgtcatcttgtttctaattcaaaaaaataaaataaataaaatttctgctttcagtgcttttgcattgaatatttcttatacatgcatttcaatgccctgagatcacattattgttatagaaaaattcctggaagcagagccactaagttcactagcagtttgcattgtcaattttgatgggcattggcaaatttcccttccaagaagtttggccaattcaatagcataaaatatctagactgcacgttccccaagcatcttagattgacatggctattgtctttaattttcacattttaatatgaaagatggtattttgttattaaatgtttattttgcacaactgctacatagaaaacctctaaaatcacttgtcagtactgattctttactcatgtattaccattttatatagtcttcagtttctacttcatttctatcagcctgttagtctaaaaattacttaaatttatgtttacttagtcaaactgtacttgttttccatgaactctgtgaagtataccaaagcatatatatatattttttatttcaggagatttcaggccaggtgacagtgtctgcatagcccattctgctagcttctgtgactgttacagcactgttgggtgtagagcaagaagttcagaaggcaatagttcacacctgctttgggcttttatgttaaaacaggagaagatgggtacagaaaggtgagcataagtatctaagttgtgtatgaatgccttggtcaaccacagtgagagagtcagtgctcaaaacattctactgctctcctaatccaaagtaccaaagtccaaattcctccagaaaaaagcatggttaggcctatcactgcattatcccagtcactggcaccaacttctgtcttagttagggtttttactactgtgaagagataccatgaccatggcaacttttataaaggaaaacgtttaattggggctggtttacagtttcagaggcttagtctattaccatcagaggatgatggcatgcaggcagacatgtttctggagaagaagctgagagttctacatcttgatccccaggcaacaggaagtgaattgtctcactgggcatggcttgataactcaaaacctgaccccacagtgtcacatgtcttccaaaaggccacacctattccaacaacaccatacttcctaatggtgccattcactatggccaagcaatcaaacacaagggactattggggccatacctattcaaatggccacactcttcatggaaatagaaaagtaactaaaacttaagttggtgaccaggaatgggcttttgttgtgacagacctaaccataatgttttgtggaggaatatggaatattttgtattttgaatagaaaagcaagtgaatgttataagcagagccatcttattaggagcttgtaagtctgtagggctgagagcaatgtggactatggtggcccagctcaagaagtttcagaggagaaccatattagtatatgggacagatattttggcaaagaatgtggctgcttttgctcttgtcacaagactctgcctgaggctaaattgaaaagttttttggcagaggagattttaagacagcgtaatattgattctgtcatgtagttattaatgatcatagttatgcaggtatataatgaaaaagagcaagcagaacaaaatggaacactgtagcaaggagaaagagagcaccaggaaatttaatttagtattggagccaagatttgtgctgaaagagataagcagaaagggaataaagggagtgatgcccagagtggtaggaccccatccagctcagcttccaatgtgtgaaaaggaaactttttctagaaaggaaagttcagcaaattaaagcttatacaagtaattcaaggaagagcccaggttccatattgagcagataccagaacttgacagtgcaggccatgtggttctgcctttagagtcatggaacatataagaataaagaggttatagattattccttcatgattaaagattactgctcaggccaggaatgtgaaagaccatttaatgaagctgtgaaattaaaacgtacattattttggagaccccaagatgttggagatgccagagttatgggatacctgccagggagagctgcacgtggggagtggaacaaactcaagtgcaaagggtttgttgtagttagcaaaataggaaaggcatctaagacttttgatattggatatagaaatgcaatgtggagtttgctgtactggattttggtatttctttggtctaggattttcttagtatgttctctttcctcccttttggaatagtaatgtatgttctctgtcattttatgatggaaatatgtaatttttattatttttattttatagttgcagttaagagactcccttgagcctcagaacagactttggattctgaaactgtcttgagactgtgaaaaactataaagacttcggaagttggaccaaatgcatttttcattatggtatggccaggagactgtgggggccaggtgataaataagacataaacagaagttctcatatccaggggaacaaaaattgggaaaaaattcaagagcccctaccaatggtatttttaaaaatggagggagaagtaaacacttgctgggggtggagactgatcaaccaagagacattcagaatgcagagctgcctatgagcctagaggctgcccggttttagcttttggagtcatcacccatgttgagatgcactttgtggtgatgtagctgctttttagttattcctgctccttgtaagcaacccctctcccatacttctgttattaaccgcaacaaaaagaactcattgcttcaccaaattggacattaaagcactctttactctggtgtgtgttcggggctcactttctagggtgagtagatatattgtgtcttcataggaaaaatctgccacacaagaggccaaggcatgatttgaagttatcgggtctttcacctatgggtggcttggagccaattccacaaatgggggtaattttactttgtctggcccttacatctcaagagtaatcatttgcaataatattattggcaggccatagtagactcttttttttttcctgtgttgatgaaatcactaaaataaacagaacaaagagtggcctttttatttagatgtggctcagagacagatttccaggttagcactttaaaacagccaaataaaattcgcgtgtttaaaaaaaaaaattccacattcctcagtttctagtggttcaatgaaaaatggatggtgatttttctttccctctaatcaattgagacattagcttactcaatttcttgaagagaaggaatcgtgggaggggccagagggagaatcctggggaaaatgcagctaatcatcaggtgacatcttcgacactaacgtttagtaactgataattgctgtaactagggccattgagctttgcaaatattatccagtaaattttaattagcacccaggggactgaagagctgtggggaaagctcttgggagaagcttccctggccagtggcaatgcgtgctgagtaatttctgatcagccggcctgtcagagcagatcagtgtcatggcactacttatctgcaggaaaacgcacctgcttccacatggaaatgaggtgcattatctgccaatttgtgctgcttatttccactgctccctcaggtttgatgagtgggaagcacaagggctaaagcagaggactgtggaggagaaaaggagacctttgctgcttctcttcaagagcacacaccatcgcagcctctgaaagggcttctttttctggcttgggctgagatgggaattttgttgatgatgtatctcaatgagatatttaaaacaagctatgaaaagggacgatggtattttgcaataagggtgtttgcattatcattttccttttgtatggagaattttcaatcttattgaagggtagggtgagaaattaggtatggagagataggatcctttacaaggactaaattgatgtcaaataaaagataatggctgataaaaacaagcaggcaagcatataattaaaaaaatagttgttttaaattttttccatcatatgaaatacttcctaatgataacaaattcaacaaatacccaaatattagggtaaaatcatgtttgagatgaggtgtcagtatgtagactaggttgacctcgaactcacaaacatccacctgactctgcaaccaaggggttaaagatgtatgccatcctagagccttcagccagcagctgatggaagtagaagcagatacccacagctaaacactgaaatgaattggaatccagttgcagagaaggaggaggaatgagcaacagggtcaagaccaggctggtgaaactcacagtaacagctgagctgaacaagggggagctcttggtccccagactgatccatgggaaagcagcatgggactgattcagactccatgaatgtggatatcagtgaggaggcctgagaaatctatggggcctcttgtagtaagatcagtacttatccctagcataggaacggactttgggagcccattccacatagagggatactccatgagcctagactcacaggggagagcctaagccctatcccaaaggatgtgacaaactttgaagacccccgccattgaaggcctcaccctccctggggagcagaaatcatatgggataggtagggtgttagtgggggtcaggggaggaggagagagagagggaactgggattaacatggaaaacaaacttgtttctaatttaaataaaaaacggagaaaaaagaaagatgtatgctaccatgcctagcgtgaggtactatttttcaaaaaataaatacttagcttgcacaatgttatgtacatactttttattgtccttgcttatgagtaagaaaatgaggttagagcaatacagctacaagctgtaggtaactcaggaattaggttgtgtttactgaatttgacctcgaggcatttagcatataaacccacacttttaatagttcaaagacaaacacattgtggggagtggaggagccctaagtgtgggaagtcctgagtgatgtgtgttgttggcatgagctggtcatgtcaaggaacaaagccttaccccagtggctcagcaagaattggcaaaatctttctttagtccacttatggatgttgacaatgtgtgcagaaaatgcacactataacctccctgtatatttatttcctgaggtctgctccctgtcagagactgctccaacaaagatggcaaaacctgcccccttgattcagccatatatataaaagctgccttccccatcaggttatgcaataagactatctgccagttcaactgttaaataaacatgcaagattacagagtaatgtggctttcccatcaagagattattttacctgattccagattttctggatttgtcttttcttcatcttctcactgtctcaattaggccactccccggagccatggaagaaagtggcaaacatgtatgagacatacatgtagaaacatgtgtatacatatacttatacacacacttattagcacaggtgtatgtatgatcatatctttttctgtctttctaactgaaagctgctgtaaaaagcaatgagtttgacatttaatgaataacttttgttgttgtttttgttttttgaaacagggttttgaaaatagccctggctgtcctggaactcacttggtagactaggctggcctcagactcacagagatatacctgcctctgccttctgagttctggaattaaaggtgtgcaccaccactgcctgccttgaatggaaaactttaacaaatatattgagatgtagtttaagaaaaacctaggttttgccatcaggaaaatgcaattagaaattaaaatcagatgccacttgacctggaagactggtatagtagtcaaatttctgtaaaacagaagaagggatgtaataaatgttggtgaagatacacaatgatcagagcccccacacactgctggaagaaatagaaaacaatgcaacctctttgagaaatagtctggacacttaatggttgaacatgaaatcaagccaatggctacatctgcacatgtatatccaaaagaaatagaagcgttttctagaccccaatttgtaaattgcattcattgaaacattattcatagtgacccccaaatagaggcaatctgtattttcatcccctggtaaccagatacacaaaatgagtacaatgggatatgcataaaagtaagtggggtaggaatacattcagcagcttagatgcaccttgaaggcttgcaacatggaagtagacacaaagacaaaatattgcaagactgtatgaaatttccagaacaggtaaatctacaaattgaaagagcagattagtgatttcccaggctaacagagtaagtgaaatagtatgtgagaataaactatgctgagcctcctttgggaagatgaaaatgctgtaaaattaattgtgatggttgcacaactatgcaaatatattaaaatccagtgattgtgtgttgagttgttcacatgtttgatatataaattaaatctcaacaaagccatttaccaacctagtatagaaacccaaatatgtctctcaaatttgaccttctacctgggtggccttaggagaatggatggcatccagtttccctatttgaaaaatatgagttttaaacttctgtttgaaatttaagtcataaaaataatgcttctaacataagcataataaatttctagtgtgtgtcggtggtaagagaagtggccattgttaatgtaacctggattctgcagccagtggaagaagagcagatttggagctgaggggagggcaggaatgagaaggcacagacacagagatacaggcttccacatgcggtgagctcaaggagagagagttgctggctgttcagggatgtcagagatgaatgaggtgggaagactggagacagagatccagagaacatctctttaaggagaactgaggaaagctcactgtggcatgctactgagcacctcagaggtgtccaagtcttagtatcgagtagcagaggaattaggtaatctggtgctttttaacactttggtagccttccaaactggggttttcatcttttccttcccgtgccccatttccagaatgcctgctggtctctgtgtactgtggtacagctctcttcctggcaggcactagaggcaggtttttgagctctgtggatgaagtaaccacagtcagtgcaaagtaaagcactgtcctaaacaacaggtgtagaggcatatggcatcaagccccatttctcagcatttcccacattctcacagaagcagaatactagtggccaggttaacttggtttggagactaatgataaaaaccagacctgttgtagcttgtcctcttcagggaaatagacattatggtgctgaatggagtttccctagaaggaagaatctggtgccttcttccttttcaaaggcaggtggggctggaacaagcctggtgtgcagatatgtgtgttcttgtgcataatatcaaatattttctgaatcaaatttgtcaaggctgccccggttacttcgaagacttgtaagcttagaaggtaagtgttataaactgacagcaatttttccaatatgtctttttgtttaacatcttcctggcttagctgtcgccctacacattcaggaatttacatttacccaaacagaaatagtatactttgtgtttcagaggatgcaagaagagagtaactaatataaatcaatacttaagtcttaaagaaaatcaagttttttctaatttagagagggaacccactatggtgacataactgtgtccacttgacaaatatttgagcatgcatggaaataatgtatcttattttgcctcaactacacaaaaggagatcaaagatgccacatggtattttcattttggctagaaatattgagtgtcacagactctgtttacatagtctgtagtatttcctttatagaaggattttatgtattctgtgtgctttgagggtcatctttgtaccacacagaaaactcatcacttctcttatagacatttatttgcctcaaagtttctcagcctagatttgtgtcacagtttataaaggcacacgattatgcattttctgtcattagtgaacttagcgctcaaaaatgcattgcaaatgccaggagaccgactcagaaagaccttctaggagcgccgttttaattggagagacagaaataaaatatatgaaacatctgaagaactaagtgaaatatgtggaagttctagctttttttgaaagaaacattttagagatgtaagtgcaagaagtagtctggatggcaagatttgagtagatagaactaaaataaagaatggtacccattgcatatgccaaaaagtgtgtgtgtaccctttgtgtggtcttaatgaatatgtatgatatatttatttttctttaatctttaaaatttgtactatatatatatatatatatatatatatatattcattgtacaaagggatgggtttcataatgacattttgctcaagtatgtcatgtacttaactatgttcattccctcagtcccaattaatattcatcttcatttgtccctgtcttcttctgccttctctctgtctctgtctctgtctctctgtctctgtctctctgtctctgtctctgtctctgtctctctctctctctctctctctctctcgtgtgtgtgtgtgtgtgtgtgtgtgtgtgtgtgtgtgtgtgtgtgtgtctgtgtgtctgtgtctgtgtctgtgtctgtgtctgttatgatggaatattattttaactatgtaaagacatattatgtttgtttatgttgcagaatatagttttaactgtaagcatgtgttaaatttgttcgtgctgcatttgtttaattatgaaaagatgtggtgctgtttcaccttgccttcctaaggcaaatgattgttctaataaaaagctgaatgaccaatatctaggcaggagacagataggcagggatggtgggcagaggggataaataggaggagaaatctaggctcaaaaagagagagaagaaggaagaagagaataaggagagagggacatgcccagggacagaaactaggcagctgccagacagacaaacatagtgacagcaggaaagtaagacataaagaaagaaggtaaaaagccttgaggctggtggatggaggcaggactggtactggggacttgggagtcagcaagacaaaacggcagcccacagactgggaaaagatcttcacccaccccacatctgacagagggctgatctccaaaatatacaaagaactcaagaagctagtctccaaaacaccaaacaatccaattaaaaagtgggcacagaactaaatagacaattctcaatagaggaatctaaaatgactgaaagacacatgagaaagtgttcaacatctttagccatcaggggaatgcaaatcaaaacaactctgagataccatcttactcctgtcagaatggctaaaatcaaaaacaacgatgacagtttatgctggagaggatgtggagaaaggggaacacttctccactgcaggtgggagtgcaaactcatacagccactttggaaatctgtatggtgattcctcaggaaaatgggaatcagtctacctaccacaagatccagcaattccactcttagacatatacccaaaagaagcacattcatacaacaaggacatctgttcaatggtgttcattgcagcattatttgtaatagccagaacctggaaacaacctagatgcccctcaactgaagaatggatagagaaaatgtggtacatttacacaatggagtactactcagcagaaaaaaaatacaatggattcttgaaatttgcaggcaaatgaatggatctagaagaaaccattctgagtaaggtaacccaatcacaaaaagacaaacactgtatgtattcactcccatggattttagacgtagagcaaaggattaccagcccacaatccacattgccagagaagctgggaaacaaggagaactctaaaagtgacatacatggttccccagagaagaggaaagggacaagatctcctgagcaaattgggagcatgggggatggggagagggagctaggagaatgagaagggtagaagaggaggggtgaggagggcatgaggaagcaataaggatgagtccgggaagaatagaggaaagcaagataagagataccataataaagagagacattataggtttaaagagaaatcaggcactagggaaatgtctggagagctacaaagatgacaccaactaacaatccaagcaacagaggagagggtaccttaaatgccctcccctgacaatgagattgatgactgacttatgtgccatcctatagccttcatccagcagctgatagaagtagaagcagacacccacaacttatcactgaactgaactggaatccagttgcagagaaggaggagtgatgagcaaaagggtccagaccaggctggtgaaacccacgaaaacagctgacctgaacaaggtggagctcttggttcccagactgatagctgggataccagcatggaactgatccagaccaaggaacttaggtgtctgtgaggtggcctcagaaatcatggggccttctgtagtagatcagtacttatccctagcatacgtgtggactttgggagtccattccacatagagggatactccctgagccaagacacatgggggtgggcctaggccctgtcccacaggacatgacagactctgaagtctctctatggaaggactcaccctccctggggagcagaagggttttagttgggagggtggtaagggagggagggataaggaactgggattgacatgtaaaacaatcttttttgaaattcaaataaaataatggaagaaaaaagccttgaggcaaaatgtagataaagagaaacattagataagagctaagataaggctaagcattcataagtctccatgttgggagctggttggctgcccaaaagaaaaagcctggtacacacagcatttttctttctggattagtcttattttcttgaatatggttagctacaattttattcatttcttgcaaacaatttcatttttcatgactgaataaaaccacattgtgtatatatgtcctacattaaaaaaatccacttatctgttaatggaaactaaggtaatttggcttttgagaacagtgttgtaatgagtgtgggtaattgggtgtctctgtagtttgcttaactggaatttttgagctatattcccaggagtgttgtagctgggttagatggtagctctctttttagttttatgctgaaatgtacttctttccatagtgactgcactaacacttgctactactagaaatctacaagagtttctttatctttacatcatttgtggttttaaaagtatgattattattacttcaatcatcggtatatgtgtgtgtatgaaagtgtgggtatgtgtatgtgagtacaggtgctcatagatgtcaagagtcctgggttccctatctgacatgagtagacacatagtgcctccttaaaaaaaagtcttgttacacaacgacactgcatactgcattcaggtatgtcttctataacatctactagtgactaattttgagccagaatttctttagtaattactttaatgtctattttgcttgttatgttaaacatactaattaagacaatcacactaaaatatttacctagaattctcatagattgtctcttttgatctcataattatgtcaggtaatttattaatagctcttttacatgtaatatgctaaaatttagtgagaatacatattttttcttatactggtgaatgtttgaaggagcaatttaaaagttctaagttccttaaacattaaaaatatgcaagagaaaagactaaaagctgttgcagcatgggaataacacttccattacattagaatttcagcaacatcctaaagttgtaaaggataaagaagtgagaacaatttcccttgtattaaaggtaaatgttaacccttaacctgtagaattttctagaaggaaaaacccagtttcgttatcatcactccagtagaataggtaagagaaggtcatacattcaaagtagacagtgaaagaaagctcctttgaaattaactgacaattcttccctttcctctctcccctttcctttggaagggtggattgtttactgtctgctgagtaactgaggtcccaccattcaaaattatgatgcttctgtgatggtctgcagtctcattgtggattgtggagtactaaaccctcccacacctcccaagatgtccctggggtgaagatgataattttcgggagtttgaactgtgtttccttacactgggataacaagcctggtgtctgtgctcttacttggagaagtctgaaaagactagattgcacaacttggggtggatggggtgcaaggagaatgaagacaggttagaaagtgagaaaaatgtgtagacctccatttctccagttttgaagatctggtattcatgttttgccataagatactgtggaagtgactgagcttgtgccctcctgaaaggttctatgttataaagaatatttattattccaaactcctgtgctttaccactgggccatcatttgggcatttactgtgacagacagaagaggtttgtgtttaaaaaaaaataataaagaactccaaaaagctctgtccataaacatttttggaggtaggagaagaagctagtgaaaaggctacagaatattatttgtgctggtggagcatgcctccttacctgctaactaatgaaggatgccttccctcgaccaaatctcgacactcaaggagtgggcttcattcccatttctgtactaatgctcaccaaactcagacctgccttgatagggcacagagaagctgtgcatttcttgtgaagtaaaaatttgactttagggtagatgttttaacacacaaacaaaagccagagtcagaatttgttgaacttgctggagatgcaatcgggaaaaaccttgtggaaagtgctacaaaacactcaagggaaagaacactcaaactatatatagcaggaagactaactaactgcttgacattttgcagatttttaaaaccattaatgatgaggaggaaaaggttgacatggacttgggtaatgtgctgtagaaggttcacatgggcgaagttgccaggctgaagctgcacacacaggaactttgaactgtgtccagagtgtttgtggttaggtcaaacacaccttttactagacgaatgacatgctgagctgcttatagttacacagtgcacatgtggttttttttcctacaaacagtaggaaaggataatttcttatagcccctaggagtcaacaagatttttgttcagagtaaagaatgtaaagataaaaagaggaaaggctttatcttagattgttacaagttcacttagtttctgaggaaatgctgcaggctagaaaatagcctgcagaacacaattattaaagaaaggcagcagaaccatacagagaattagataccagtgtgaagaagggggatctccaagggatggtcagagagaagattttggaggagccagctgtactgaagaaaaactcattttaattaaagcagtccaacatatgggaaataatacctcatgcctggaaagttctattattgagaagagcacttccttcttttttttaaataattggtttcaaaatgtctcacttttcctccagcttgttttcttcttactgggcattcttttgattcatggcataacctctattttttttaaaagacttgccttaggggtgtgttttggaaagtttagaaagaaaattcaatgatataagtaaaatctgggatgccagagctattttcatgcaaattgtaatgaatatatatatgtatatgtatatctatatctatgtataatgtatgttgtctgtctgtctgtatctatctatcatctatctatctgtctatctatctatctatccatccatctactatctattcatctatctatcgtctatcttcataatcatcatcatctatcaaaccattatagaaaaatagtaagtaaagggaatttgggaatttctagtaaatcagaagagagtgaacaattaaaaaccaggcatcttgttcatggagacagagttgattctgatctgcagtcacatttggaggcacatttgtttgtttttcactttatgtgttacttcaaagtcatggcagatttttcactttgaaaatataaattcctttcttctctttcctattcctattctcttaaaatgtcactcccacctgctacacagctagaggctggaaaggtggcatttgagcaggttagcacaagcagatcttgtttcttgagtcaaatgtgtacagggtgcatgtgtgtcactctcagaagattagccctctgattgtttacttgctcatcagtgatttatcaataaaagtgtcagtgccgccatgctggaggacatgatgggcagtggtacagtgttagtctgctgacatgaatccccagggagcttagaaaagtgccttggccaagatgttgatctaattgacttctgtaggtcctgggtattggtattttttgacactgtccagtgatgttgggatgcaggtgggctgggatggcctaggtgtgccaggccacccatgggtgctttcagagagaggtactgtgtgatttaatccttgcagtactgcagtggaggcgttggaatcttcattttgcagaggggactgtaattctgagtgacggcatgattcccccagcaccacatcactaaggtatggaagggtgtatttcatttctgtcattgtgtttggaaattgtaggttggaaaagctaattcagttccactcaaataaaatggtttacctgtgaaacgatttacaccatctgtgcctctgaaaatagagtggcaagttccattatggaactgtggaaagtttgaccccaaatgaacaactgataaaaagtgaaattaaataacatacacaattttagagaggagatccaaaaataggtctcttaaaattatttctattatttgcttttatatttatatgtttcaaaggatagattcaaccaatctttatttttcagcgtttgacacagtatttcttttctctattatttctgagcaagataaactcaggaagcactagaaatgtcatgcagtaggtttttcttcctgataacacatgaggcatgtgaaatattgataaaacaaaaatatacttttgttaagaggttttgaattattgctttagttataaactcaaaatggagaaggtattctcagaggagcttagcaactgtgacagccatcactgtgctacacttctgtacatgaaggagtcttggtacagcatatcttctcagctgacaagtaaatgttatgtaccataaaaatacaaactcttataaaaaggaagttagtgaacagagagcatacttcctagtacagaaaccctgcccactatgaatgattttatcaaattctttatggctattcatctagtagtaattaatgtctcttcaagagtcaatagcaggatactagaaatattacttttcaaaatttcaacattaattctacccacatgtgtgtatgtgtgggtatgtgcacatgtgtgtcatatgtatacatagggaggtcagaggacaacttaggtgaatggctttcccttcccaatgtataggttctgagtatcaaacttgggttcttaaacctatgggcaagcaactgtacaggctgatgcatttcgctggcataagtgtaacatttcaattgcaattacaattggctattttttattttattcatttatttttaatttaaattaaaaacaatcttattttacataccaatcccagttccctctccctcctgtcctcccgttccccccaccatcttcccacccacctctcatccactgctcagagagggtgaggcgttccatcaggagtcaccaaagtctgtcacatcatttggggcaggactgaggccctcctcccctgtatcttgactgagagagtatctgaatcccaactaagaatctaacaataatggagattctgccttaaatacccttcccctataatctcatcatatcaaatgccgtcatagagccttcatccggtagctgatggaggcagaaacagagattcacagctaagtactgagccaaactcctggaatccagttggagagagggaggagtgatgagcaaagaggtcaaaaccatgctggggaagcccacagaaacacctgacctgagctcatggactccaggctgacagctaggaaacatgcataagactgaaccaggcccccacaatgttagatcgggggcttggacagtctatggggcctctgacaggggaactagtatttatctcaactagctaatttttaaaaggccactctgtggccacttataaacctgtatcagtagtttttcccttcattttgttagtttgttgagaattttgtacattgtaatttgatcatatcatgcctctctcaactccttcaagacccacccccatttacctatcagtgcaatagtcaattctcttttcttttttaagcctatcaattgcagtttgtgttcccaatatgttttggctgtgtggctttccaatgcggtatccccacactaggatctactaggatccacaacgttgaagaagactgactgtccctctccaaagaggtatcaatagtcagttgctccttagctatggtagaacttgatggccacctcacatttccatgatgggattttgtgcagcttgagcttgtgtaggtcttgtgcatgctctcacaagttctttgaattcatacatgcatatgccctgttgtgtcagaagacactgtttccttgtacctagccactgcctctgcctgttcaatcttctgcctcctcttccacattgatccctgagccttacaaggaggaggtgtgatttagatgaggtgtgatttagatgtcacatttaggactgagtacttcataatctcttattctctacatgttaatcagttgtacggctttgtgttaatcgccatctaatgcaaaaagacactttaaactaagggttgagacattgatctgtttgtgtgtaaatggtaagcattaggagtgggtatatttagtcagaattttcaagagagtaacagaatttacagaatctctctctcttctctctctctctctctatatatatatatatatatatatatatatatatatatacaggctatggtctaactaatccaacaatggctatctatgaatagaagacccatactctagtattcagcccatgagacttgatgtcttgactggtcttcagcatatgctggaatcttgaggaagtaggctcttgtgttagtgaaggaatagactccatagcaagtacaagaccaagcagcttccttcttctatgttacttatataggcttctagcaaaggtgtggtttagattagacgtaggtcttcccaccccaaaagacctgaattaaaggtgtgtcttcccaccacaaagctatggattagaagttttccacttcaaatggtgtgcacagacaattttggttttagttaattccaaatgcagccaagttgacaaccaaaatagccctcacagttggtttatttaatactgagcctatttattagaacattagaaatattttctcccttagggcatacacatgtctagtccttcgttcttgtccatgaaaataatgccagaggaaagaaacccatatgcatctcccatagtaccacttcatagagcaggacttaagtaaaatcataaagttgttggttacttccatgacacttctgtggacatgtcttgcttggtaaatcattatactgtgctgagatcacaattgggtaaattgacaattattttttctcctcaaggaatgtgagtagaacatccagtagtatgaaagttatcaaatagaatgaagcttataggtgaatacaagcttgatttcttcatttcctgtttctcatgtttgtagtgctttcagaaaaaggctcctactgtcaagttctggagagcaagcaagaacattgacaacagactataatgttcagaggatctatgtgaatcacatggccaacaactccaaaagagctaacccattcctgacactaggccttttatttgtaagtcttggtgcctactaaaggcactgttgctatgttatagaatagctcaatttaaactattttatgtatctgtatgtatgtattttaggaaaagtccacaatagtagatttctacatggctttttgaaaggtctttggtgttagttattgcccccttcctctattctgtcattcctctccccactccatacaactcttcctgttccatgtttaccctttaactatttataccatcgtgttatagctcccattctttgaaagaccccatggccccttactgtatcctgacttctatggtaattctaaatagaacatttatatctctatgttcaaagctaacatccacaaaggagacaaaacatatgacatttcttctgggtttgggttacctcacttagaatagttgtttccaaatctacccattaacccgtgattataactttgtttttctttaaaatgtaatattccattgtgtaaatgtactacattttaattatgtgtttatcattatggacctctacctagggtgtttctgtttcctggttattgtgaatagagcagcaataaagaggactgctggattcttgagtatatcttttgtaagacacatagttatttaagtatctgcccaagaatggtttagctgtatgatgtggtatatagatttcaatccttttaaggaacctccacactgatttccatagtggctacatcagtttgtactccaccagaacttaataaacattcattttttctccaaaatccatgcaagcatttgtaggcacttttttttttatcatacccattctgaacagggtaagataaaatttcaaagtagttttcatttgaatttccccaaaggccaaagcttttggtgaattttaaaaatctttcagtcatttgtattttatcttttgagaactctgtttagttatataactcatttttaaattggtgtgtttgtttattgttttgatattccagatgctaactttctcttctgatataaagctggtaaagattttttagcatcctctaagctttcacttcactggagggatgatgcccctttctgtacagaagctttttagtttcaggaggtttcacttgccagttgttgatctcaatgcctctgctaccagggtaaatcagaatgtctttttctgtgcctgtaaattcaaatacgttccctactttctcctctattgaaaaatatcaggacttatgttgaagtccttgatcaattcggaggtgagttttgtacagatgaaataagtatctatttttattcttttacttcagtcatccatgttttccaggaccatttgttgaagatgctattgttttatttcccctccatgctgtatgtttggcttctttgtcaaaaatcagatagctgtggtttgtgaacttacatgtgaatcctcagttctagttcattgaccaatgtgtctgttttcatgtcagcatcatactgtttttagtatatgcctcatattataacttaaattcagtgatggtgatacatccagttgttctttgcttgtccaggtgtgtgtgtgtgtgtgtgtgtgtgtgtgtgagtgtgtgtgtgtgtgtgtgtgtgtgtgtgtgtgtgtgtgtgtgtgtatgtgtgtgcttacaaatgaaatttatgattatttttcagtttctgtaaagaacttatttggaattttggtattttgctctctgtagattgcttttggtagaatgtccattttataatatcagtactactgatgcatgagcatgggaaatcatttcatctcttttcttcttaaacttcttccttaaaaacattaaatctttattagttaagattttcacttcccaatttatacttattctaagatatatatttgtgagcctattgtgagtggtattctttccctcatttctttcttggtttgtttatttgcatacatgaaggttactgcctttttctgttaattttgtatcttagtacttttctgattgtgattatcacatgtagaagttatctggtgtcctttagggtctttaaaagtggtttattttattttattttattttattttattttattttatttttaggtgcatgagtgttttgcttgcatgcatgttagtgcatgtctgctgcccagtaagaccacaagggggcgacagatccccaggaactggagttatacaggtcctgggtcccctgcaatagctagtaccaagtgctctctcttaaccactaagccatctgtccagcctgtgtttgacatcttttatgtataaaattatattacttaaaataaggataatttagcagggcgttggtggctcacgtctttaatcctagcactcgggaggcagaggcaggcggatctctgagtttgaggccagcctggtctccagagagagtgccaggatagactccaaagctgcacagagaatccctgtctcgaaaccaaaaaaaaaaaaaaaaaaaaaaaattaaggataatttgacttttttcctatttgtgttacctttatcttctgttgtctatagctctaagaatttgagtattatgttgggcaagaatggatagaatgggcatctttgttttgcttctgcatttagtgcaaatgcttttaatttctatccatttagcattaaaatagttatgtgcttgtagtatagtgtctttattagattgtgatttgtcttatgtattcctagattctgtagtatgaataatataagtttggcctcaaactcagagacagatactgtggttcaagctgtagatcagaaaagcaaagcagccagccagtagctcttacatctatcaaagcttagaccaaaggggtgatccactaaacctcagattacatctctggactccactgctctctaccaagcctcagactcctactttttgggactgcactgagctccttatatactgtctagtgctgggactaaaggcatgagatctgttaatcttctagactgattcactcttgtgtagccctgggtggccttgaattcaagtagattcttcgacctctgtctcctgagtcctggttgtgtaccacaactgcccagcttctatggctagctcgtgtggctgcatttaatgagctgatcatatgctttttgtgtttgaatctgcttatgcagtagattacatctattcatttatgtgtattgaaccatccctacatttcatagatggagctgacttgattatgatgcattatctttttgatgtgtccttgaattcagtttggaagcttttttaaaaaaaattttggatccatgctcattggccagaatgtctcttcttattttgtttgggtctttgtctggttttcaaattagcttgatacttggttctcaaaaataatttggaaatatttcttccttttttactttgcagaataatttgtggaatattttggttgaaggtctagtagaattttgctatgtggccatcaggtcctgggtttttatttttaagttgggagttttgtaagtattccttctatcccattgcttttataggtctgtttaaattatttacttctttttcatttaattttggtaagttatatgtatctcaaaattgcttcatcgttttctttcagactttctagtttagtggggtgtgaagttttaaagtatatcctcctgattctttgaattccctcagtatcttatgtgatgttttcctttcttcctcagagtttactaacttggatcttttgtctgtttattttggtcaatttgactgaatgtttccagtcttttcaaagaaacaactatttctttcactgatttcttttgcagttttatgtaattaacttcagcttagggttactatctcttttcatctgttcttagggtgctgagaattcttgttttctctgaccttctggagcatcattaagtcagtacttcaatgaattctttctttcttttttttttttttttttaaaccaagcacttttaatactgtaaacattcctctcggatgccttcaccatgtcccacagattttgggatgctgagcctttgttttcattcagttagaggaattttaaaatttccttcttctagtccttcatccagttattattcagtagaatgtggtttaggttccatgaggttgtgtactttctgtaggttctattgctgttgatatactgtttccttcctttgtggtcaattagaataaaggatgtcatttcagtttcctgacatttgctgagatttactttgtgtcccaatatgtggtctaatgtggagaaaattctaggagcttcataaaagaatgtatattctttagtgcttgagtggaaagtactatagatatgtattaggtccatttgatttatggagccacataagctccatagtctcttggtttagttgtattctgtatggcatatgtattatgtagagcagggtgtttaagtcacccactatccctgtgttaggtccaatatgtggttttggttctagaagtgtttcttctatcaaatttgcatttagtctgtaaaaataaaaggattgtaatattcttttgataagtttttcctttagtgaatattaagtgtcccttttaatcttttctgaatacttttgttttaggtctattttcagataatagaatagctacatctgtttgcttcttagttccattccactgtaatattcttttccatccagttgttctgccctaaggtagtgtctgtcattgctggtgaagtatgtttcacagaggcggcaaaaagatggctcctactttctaatcaagtctgctggattgattccatttgtttgaaaatagagaccattattgttcagcgttattattgaaatgtgtgtattaattcctgccattttgttcatttttgtgatttgtttttcagatctcgctcaatgatctgtctggtcattgttcattttttccttgtgaccttgcatgtgcttactcttctctacagagacaagtattcctttctgtagagctgagtagccataaactcctgtcatttgttttaatcttgaacatttttatttcatattcaactttagtaggtattttttatggatatactcttctggactgacaattgtggacttccaagacattgagtacatatttcctggccattctggcttataaatgttgctgttgaataatcaactatgtgttattctaatggccttgactttataaatcacttgatctttctttcttgcagttttcaatgcctgatttttaatctgtgtttttaatgtttattgatctgtcacagagaatttctttttgagtcttatttatttgatattctataggacttttgaacttgcatggccatctatttctctagatttggggaaatttctactatgattttactgaagatattccctattttttttgctatcgtatccccctccttctgtgctagttatttaaaggtttgttttctcatagtgtctccaagttccattcatctatatgtgtttgaatggaacacacacacacacacacacacacacacacacacacacacacacacacacacacctcataatgttttaatttaattgctcattgacctttattccaattcctttactttgtcttccatctctgactcctctttatggcatggtccattctgatgaggaagctttccacggaagtttttaattgacttgttgagcttttcattttcagcaccatttcaatttgggttttcttttagaattcaagctgtattttaatgtcttggattaactttcttatttcattcagctctgtcttttttgagttattgggccatacttacaaccattcatttgaatttttttgcctggaagttcttcaaggtcattttaattagtaactattactatgggatttatagtttttgaaggtaacatgttactttggtttctcatgtttttatttctgtactgggattcattcacacatcttggttaagttttttttttctgttttgttcaagtcacctttcttttcttcccttccttccttccttccctccttccttccttcctttattctctttttgcagaaatgcttataatgtccaggagtagcccaattcatagtaggtttgggattttgatgttgttctttttgtctagtatttgtgaatactgcctctatctcactgtttttattacttgtctgctgtagtctggtaccttcctcagctttttgaaggaggttggaaggagttctacccagcagtatggattggttctgtgtctcaaggccaaatagggcagctggattgtcccagtcagaaaactggcaaagttctatgcctccaggtcatatgtgttgggagaagatgatgatccttggatagaagctgtggggcttgaatgacacaagtggaggtacaaaggaagaggagaaccatagcctacctggatctcttacttatatgtctgtttcactgctttttagtggctatatagtgctatattggataggaatgttagttagcttatttatttatttatttatttatttatttatttatttatttattgtttcttcaagaatgcttgtgaccagtgtaaggtgacaaactctagcacttttttcagactttttgttgcatttttattaactttttttcatttattttacacactgaccatatttcccctcccttctttcttcttgttccctcacctcacctccaatatacccaacctcctgatctactcctcctccgtctccattttagtttatttaaatggtacctactgatgatcactcagtgtattgtaagatttttattatcatgaactctactttcaaatgtcccataaattatttgaacaatgtcatacttcaaacaaccatgaaaaaatgcaggcataccctgccctatatttactaactattgtgtatgtgtgtttacctgcttgtgctgggctcagaagagggccttagaacccccagagatggagttaaggcatatatgtgggatgcctcaattgtcacatgggtgttgggattcaaaccctggtcctcattattgcacagaaaatgctgtcaaccactgtttcgccatcgttccagcccctaagttttattttactgaaaaacttttatctaattatcatagatgaatgcttgttcattttgtttatatagaaggcactttgttgttataaaaatgttttagaatccatcttttaattattggctcctgatatacagaaatctaatgactataataataattagtcttatgcattgcttttttttgagtcttcatactgatttcatgagttaatcctcatttgaaactatagatccttacataatcattagcaatgtcagcattctaatactcctttatttgtactcatgcttataattttcatttcctttctagtttctatcatctctaaggcattgctgttgttctttaaaacaggggcttactctgtagatgatagtctctgtagggagccaaatctcagtgcttggcatgagatactaagccatgcttggcaggccacatagttaacctttacatagcagctccttagaacctcagctcaagaaaagaaacaacttaacacagtcctccacccacaggctcagtcacctaggcaatcccttcctggacctcttactcatgaactctttaccctgccaaacatcctctttgcgacttcctaatatcctgtctatactaacacctggtgaacaaacaacccattcttcccctccgcatatcctgactctataagctagcctgagaaaagtaaagtttgccacttgataagaatcctgtcttgtggtcgttctttctgcatctcttgtccccattccctatccctgactctcttgccccaggttgacatcctgcaggtcaggagaagtctccagttcacagagatctgccatgcttggcctctggagtaggcagttgaaggtgtgcctacctttgccagctttctaaaacaacattaggcaggcatttttatggaaatctgtaatatgtgcacttcaatgaaggaaagtttctactagttctgttttgccaaaggcctttgtttgtcattagaagacatttaatctcattaaacgcttgtgcatctttgatgataatcatatagactgtgggctactgtattttgtgcacttttataagtctgctaactgatatctgattttaaaaagttagtattttcttttatcaaataattttttctcctcttatgggcccagtaaaagctatttgaaaagcatttcctgtttcctttctttctgagtttttgcaatattgcacttctttctcaatacctgatgtttaaaaaaattaaaatatatgtttataaagtgagttgtacatgaatgtttataatagtactattcattatagcctaaactgaaaatagccaaggtatcaataaactgtggtatattcatattgttcattttgagttattgagaccaaatacccagaagaattaactaaagagagcaaaggattattttgactcattgtttcagagaatttctgtatattatagtgaccaaggcctggcaatgagagcttatgacagtagcttgattacagataggatacagccaacaggtaagatcctgatgtggagaaattatccacggcctactgatttcttttggccaatcaggccctgaatgcaaaaggctacacatcttcaaaatatcactataaaccaaagactgagtatctaaaacatgatattttgggggggttatattcaagatataacattatccactgaaaagggaaaaatattgcaacacagtgaatttaaaaagtatatttagtataagtgatcagatagaagacaatatatttattttaagattccctaatatgaatttttagttgaagaaaaacatgattttctaaaaaagtcttaaaagcacactaatctatggtgatagaaagtcaggattgtttgaatatatgtagtcattgatattgtttaagaaggaaagggagactttggggataggataggcttattttatatcttaagagcactttagattgtctcattgtaactcagtagatacacacacttcagaattttgaatttgactatgtaaaaatgttatgtcaaatttataccaacaataaatatgtcaagtttggagttcattaaaatgtaagctgattcatatgtggctagactgaatgtatagacaatgtagtacctgtaataacaaaaaaaatgaggatgtgagggcaatcttgctgtgacaactgtcaccccattgatcaccagggttgagtcatctgatctggctggctacaccagtgtcctcttcctccctcaccactctatgtgcagtcttcctgaagctgtgcgcttggtcaaagagaatggcctttcctgaatagaggaggtctggtcttcgatcaagggtatacaagtagctgttcttcactgctagaacctccaaacaagctctcaagaacagaaaataattcatggggagaatctagttggcacatatatgaatttttgctataaaattcttttctgtgacttgcattttctccaaaagtttcatgctaatgttacaactatctatggtttaattagacaatttatctatttttaagattaaatgtcttacataatttttagttttgtatttaactttatatcatagacttttcatatatatgtatatgtcttagaataataatttctacttattttatagtacttagtcctatttccttgtggtgtaaaagaccctatgaaatactctaagaaatacaggcatattactcctaagaaatttcaaatgatggaactatctcagacttttttgaaagcaggttctgtgtaaagtatctaggaaggtttaccttatttttatacccatttttctatatttccaataaagacagtataataaactattttgttcctaaggacaaaagtaggagcactgtaaatatgtggtaaatgtaaggtttgttttaaatgcattttatattttaaaaaaatactacacattagtcattaaaacaggaattaacaaggagaattttaaaacagttttccaacttaactagacaaactatatatcttatttagtaaaatgttgctgtgacctgtctagttttgattctcaaagaaaataggaatgatcagaatttatgagtcaaaaagactcaaaaaggcttgaggattgatgatttgttttgaagaaatctgaacacttaaagtcttaattacttagcttcttgcctttcttttctttttctccaaaacaaatattatttactccagaaatggacagctgggtctgtgaaatattattaaatattgcttgtgttggaaatatttcagatcaaataatattgtgacagtattattgtaccaggatctattaattgctttatgtctgcaattcaaaaaaatggaatcatagtgggaagtgagtctttatgttatttatttatggatattaggcattagatattgctatgggacagatattgaatgtttcttgagatctacatataaaatctttctcacctaaggaagtactttttgatggtggaaatgggtctagtatgaggtcctgagactatttgaagtagacttttattacagttagttttaatatttgtaatattgtaatatttgcatagcatagaatcatctgagaggaagaccttagttgaggaacttactacatcagattggcctctgggtttgtctctgggggatcttcttgatcaataggaagactcatcccatgtgggaggtaccatccctagccaagtggtcctgagctatataagatagtcaaacatagttcagtgagtaagccagcatgaagtgctcccccatagtttgtatttcaaattcttgtgtgagcctctactatgacttctgttagtgatggactgtgagctgtaagccaaataatccctttaatcacctaagtttcctttggttggagcattttattatactaacaaagaggagacaagaacaggaattaatatcagagaagtagggtgttaaactgatggacctgactaatggctttatgtgctgttaggctgttttgttggaagattttggaggattttagaatgctgagctgagaaggttattgaatgctcagaggtttataaggtatcttagtgttgagaaaaatgtagactgtggaggcctgatacctgaagtttcatataaaagttaaggctatcaaaaattaagatgaggatttatattttattttgtatccagagtttgagtgttctggtcagctggggatgaagaatccgttgtaattaataagagatcaacatcattaagtgaacattattgtactttacagagacaacaggaatgtgtttccccagggttggcacacagaatttgtagtcataggtgtgccaaggctgtatttcatactggcagtcaaacttggtgatgtgtaagagttactcttatgatatttggatcaaaataatggaacctgcataaaaaaaagctgactgaggctcggatctgtgtcagggtcagagttcctatgaagagggcaagagaagccactgataaaaatgctacctcatttacagttgagttcccaggatgcaaaatgccaagaacatagggcatctaccgaaaacagtggcagctgcagagtagagccaccatgggtttttgtatgtgctgcagatgcagagtttgaagagtgggtctactaaagacctcatgagctagaaaattacataattagtgagtcccagatgctggacattaagaatctggatgcaggatgtattgtcctagattttgggtttacttgatttcattgattttatgaactggttcttccctcttggaataagaaattatttttttatttatttttatcttaaagaagcccacagttaagatacattagacttttaaaagtgttagaagttttaaagactgtgggacttcttaagttgtactatgttttatattataacatgagctcttggggacaaagaattaactttatggtttaaaagtgacatgttctgactattacaaacaatgctgctatgaacatagttgaacatatgtccttattgtatgaatgcacattccttggttatatgcccaagagaggaattgctggatctttaggtaggctgattctcattttcctgagaaaccaccatactgatttccaaagtggttgtacaagtttgcactcccaccagcaatggaggagtgttcctctttctccacatcctctccagcatagactgtcattggtgttattgattttagcccttctgataggagtaaaatagtatctgagtggttttgagctgcatttcccagaacatggaagcaacctaaatgcccccaactgaagaatggatagagaaaatggagtactactcagcagaaaaaaaaacaaaaaaacaaaaaacaaaacaacaatatggaatcttgacatttgcaggcaaatggatagaactagaagaaaccatcctgagtgaggtaacccagtcacaaaaagataaacatggcatgtactcactcatatatgatttttaggcatagagcaaaggattaccagtctataatccacactgccagaggagctaggaaacaaggaggactccaagattgcatagtccctcaaagaagggtagggagacaagaacccccgaacaaagtgaggggatggggcatgggtggagaggaaggaggcaggaagggaagaaggggagggggtcggagaacaagaggactgagatgggaggaatagaggagggcaagaaagaagatgccttgatagagggagacagtacaggtatggagagaagtctggcacaggggacatgttaggggatccacagggatgaccccaactaagaatctaagcagtggtggagaaaatgccattgatgcccttcccctataatgagattggtgtctaccttggttaccattcctagagcccttcatccagtagctgttcgaagcagaaacaggcacccacagctaagcactgaaccatactactggaattcagttgtggagagggaggagggatgagcaaaggagcggacatggggctggagagacttgcagaaacagtggacctgacctagtgagagcatggagaccctagtcataaagctgctgaaacagcattggaccaaaccaagccctctgaaagtgggtgccagctaggaggccagagtagtctatgggacctctaacagtggagccagtctttatctctagagcataaatggactatggtagcccattccctatggagggatactgttgcaggccagatacagcaaggagggcctgggccctcccccaaacaatatgacagactttgaaggtccctggtggagggcctcactgtccctgggggagagttgggggggttggtggggaacatgagaggatgggagggtgagagaatgtgggggatggatatgtaaatatgagtggtaattaaagaatttaaattaaaaaagtgacatgtttaggacttgcttggttcccttagacagataggcccacccccaaacaggccatgcctgctagaagacccgcacccaactctggcaggcaccacctactcaaacacaggctatataggccaggagatcaggtagccagcccacctgaggaccttttgcacttttgcagtgtgccccactctgatactatccccagttcccatcccatcctcattgccatatcccagatcccagagtccacactgtccatgagaattagaggccatgcaggctgccagaataccagtcccaaacttgctcaacaagagaccacacttggcaccagaagtctacaccccgacttcagtggagaatcctggtgaaccacagatcacacgggtgagaagagagaaatcagaaaccaagaaacaaaacatccaccaaacaaagacaaatccagaaattggcatctacacctgtaatcaccttagacccagatgcctagactccagatttagaacacagtaaacagcagccagggcaacatgtcatcaccagaatccaggttttttattacaacacaccctgaatattccagcacagctgaaacacaacaaagaaagaccttaagaccaactttatgaagattacagaagtctttaaaagataagggaatacatcccttaaagaaatcaagggaaagacaaagaatgggtgaaatgagtaaacctcttaaagaaagccaaggaaaaacaaatatacagatgaaggaaacaaaattgctttggacataaaaatggaaatagaatcaataaagaaaatacaaccttagaaaattccggaaatgggaaatctaggtaaggaaatgacactacagatgctagcatcaccaacagaatataatagatggaagaaagaatctcaggcattgaagttactatagaagaaatagatgcatcagtcgaaaaaaatgttaaatctaaaaaattcctgacacaaaacatgcagggaatctgagatattatgaaagaccaaacccatgagtaataggaatagaagaaggaacgaataacagttcaaaggtccagaaaatattttcaacaaaattatagaagaaaattctcctaacctaaagaaggagatgcccataaaggtaaaagaagcatgcagaacaccatatagattggaatagaaaagaaagtaccctcaccacatcataatccaaacaccaaatatacagaacaaagaaagaacattaaaactgtaaggaaaatagagcaagtagcacataaaggcatacctattagacttacacctgacttctcaatgtagactgtaaagccagaagggcatgggcagatgtgctaagtgtctaagaggctacagatgctatccaagactattatacctagcaaaagttttgaacaccatagatagagaaaacaagatattctatgataaatacaaatttaaaagatatctatctacaaatccagcattacagaagatattagaaggaaaactccaggtggttaactgcacccatgaaaacacaggcaacagataatctcataccagcaaaacccaagaagggacatacataacagggattagtaatcattggtcattgatagttctttgtatcagttccccaataaaaagacacagactaacagaatagaaataaaaacactatccatcttggtactgcataaaagaaaatcatcaaaagatagacattacctcagagcaaagtgttggtaaaagatattccaagcaaattaacctaataagaatgctggtggagccacactaatatctagcaaaatgggcttcaaacaaattaattatgagacacggaatgactctttatacttatcaaaggaaaagtcaccaagatgacttttcaattcttaacctctatgtccctaactaaagggcacaaacatttctaaaaaatgttttactaaagcttaaatcacacatcgaccctctcacattcatagtgtgaaacttcaatatcctattctcaccaattgacaggtcatccagccaaaaactaaacaaagaaacagataacagatgtgataaaccaaatggacctaaaagattataccttcttagcacctcaggaaatttgctccaaaactgactgcatactcagaagcctcacacatacaagaaaattgaaataaaccctttcatcctgttagatcacaatgggttaaagcttgatttcagcaatagaatcaactgaaagcctactaactcattgaaactgaacaaatttctgctgaatgaaaaatgggtcaagacagaaataaagaaataattaaaaaattcctatagtttaatgaaaatgaacagacaagttacccaagcctatgcgacacaatgaaagtggtgctaaaaggaaagttcatagtactaagtacccacattaaaaaaatggagagattttagatatattaccaacttaacagcacaccggaaagctttagaacaaaaaaaaaaaaccaaaacaacaacaacaaaaaaaacaaaacaaaacacccaagaggattagacagaaggaagtaatagaaatgaaggctaaaattaataaaatagaaacaaagagaacaatacaaagaatcaatgaaattggctctttgagaaaatcaacagcagataaactcttatcaagatagagagagaatatccaagttaacagaatcagaaatgaaaggggggacttaacaatagacagagaaggaattcaaagaatcattaggtcatactttaaaaacctgtactccataaaattggaaaatctaaaaaaaaatggataatcttgtcaatatatactacttaccaaagttaaatcaagatcagataaacagcttaaatacacatgtaatcccaaaggaaatagaatcagttattaaaaatctaccaaccaagaaaaggccagggccaaatggttttaatgcagaattctacaagactttcaaagaaggcttaattccattattccccaaataaatgaacaaaatagaaacagaagaaacattaccaaaattattttatgaggctacctatagtttccctgatatgcaaaccacataaagactcaacaaagaaagagaattacagaccaatttcccttatgaacatagatgcaaaagtattacacaaaatactttcaccaaattcaagagcacttaaaaaaggttattcaatatgatctgataggattcttcccaaagattcagggatgggtaaacatatggaaatctgtcaatgtaatccaacatattgtggatcctccaactgtgattggtcattgtacacaggctgttccaggacacagagtagggtcttggggggtaacgagttcagtggaccaggagattgttttagaggacagatattgaaatggcaaggataggttatatagttcaagtcaggagaaggggagaaaagaagtcatgggagaaagtgttgcagcagggacaggctctctccaagcatatcagaatggcagacttccagtcagatgatttctgagaagccaattccctgtggagaatagacacttgactgactaacttaattataatggagcctttgtctctactgagttgagtagttccaagcctgatttagatagcatcttcaacaaatggtgctggtctaactggatatctgcatgtggaagaatgcatatagatctatatttatcaccctgcacaaaactcaagcccaagggtatcaaaggcatcaacataaaatcagattcactgaaactgatttaattgaaaaatggggaatagccaattccacatctgaaagatggataatacccaaaatatatacagctgacctgacctagtgagagcacacagaccccagttgtaaagctgaggaactagcattggactgaccaaactctctgaatgtggatgccagttaggaggcctgggaagtctatgagacctctgacagtggaacaagtatttatctctagtgcacacatggactttgggagtccattccctatggagggaaactatttcagttcagatacatggatgaaggcctaggccctcccccaaaatgatgtgacagactttgatgattcaccatggaaggcctcactgtacttggggagtgagtgggggtggtagggggcatgggagtgtgggagggacagggaatgggggattgatatgtaaaatgattgtttttaaatgaaaaagaaaaaatggaatatagatctaaacagaaaattctcaatagagaaaagtcaaatgactgagaataacttaaataaatgttcaacattcttagcaattctgaagatgcaaatcaaaagtaaattgagattccattttacacctgtcataatgactaagaccaataacacaaatgacagctcatgctggaaaggacataaagagttttagttaagttttctattgctgtggagtgaaacatggccatggaaactcttataaaggaaaacatttaattggtgtggcttacagtttcagaagtttagtccactgtcatcatagcaggacatggaggcatgcagacagacatggtgctgatgaaggagttgagaattccacatcttatcttcaggcaacaggaagtgaactgtgtcactgggcataccttgagcataggagacctcaaagtccacttctgcagagacactccatcaaggccataactactccaacaaagagagtaggagagagacaactggaattggggatattttggggggaattcagaaacctagtgtagcaaaaacctgctagttcctatgatggtgaccccttgaggactccagttaatggaaggtctggaccctgatctgaccattttctgtaacaaggcaagacttctagtgttgggaaagaaacaataacagccataaaatcttctacccacaaactgtcttgcctgtaagatgtgctaaggaaatggtgactcagagcttgtgagaatgaccaaccaataactggtctaacttgaggcacatgccatttgaagaagtccataacctacaatgcctagatgaccagaaactggaaactcactggcccagaaacctactgtaaaaccaaacatgataggaataaaatggttaatgaaatgagtcttaatgatatcttttatatccaatatccacttatgagtgagttcatactatgtttgtctttctgggtctgggttatctcactcaggatgtttttatctagatccatccatttgcctgcaaatttcaagatattgttttttacagctgagtaatactccatcgtataaatgtaccatgttctctttatccattcttcccttgaggggcatctatgttgtttccagattctggctttacaaataatactgctatgaatagagttgagcaaacgtccttgtggtgtgaacatttctcctttggttatatgccccaagagtggaattgccaggccttgaggtaggttgattctcagttttctgagaaagtgccatactcatttccacagcgactttacacatttgcactcccagcagcaatagaggagtgttccccttactctgcatcctctttagcacaagatgtcatcagtgtttttgatcttagctattctgacaggtgttaagatggtatcttagagctgttttgatttgcatttcctgaatggccaaggatgttgagcaattccttaagtgtcttttggccttttgaaattcttctgttgagaattctatgtttatgtctgtactccattttttctttggattacttggtattttgatgtctagtttcttgagttctttatatattttggagactagttctctgtctgatgtagggttggtaaagatccttttccattctgtacactgctgttttgtcttattgatagtggtgtcctttgccttacaaaagcttctcagtttcaggagctcccactgaatgattgttgctctcagtgtctgagttactgaagctatatttaggaaatgcttttccgtgcctatgtgttgtctagcccaatcatcatcagaaaggcttcctcaggcagctgatgggagtagatacagaaatcacagcaaaacatgaagtagagcttggggaacgatgcagaagagggaagggtcgtaggagccagatgggttgaaggcaccaggagaacatggcccataaaaatcagcaaagtgcggctcaccataactgcagtctgtgctaatttctctgcacatatgctgaggttgtttagcttgaggttttagtgggacatctaataatgagagtgggggtgtctcttactgcttggtctgctcttgggacccttttcttcttattgggttgccttgttaagttttgatatgaaaatttatgcctagtcttacagcatcttgttaagctgtgtttggtcgatatctctgggaggcctggtttttctaaaggcaaatggaagaactatggatcttggggtagaggctatggttgggatgtggttggagtgttttttttttatttttgtttttttttttttttacttttaagacaggctgacaaacacctattatataactgataccttgtaaattgatgcaaagaacagaattttgtacgataaacatttcaatcattttaaagatttatacagagttaatatgttaacctgtgcatcccttgtaaaaatcacattaaagaacccttgataacatcaataatttaaaataaagttataaaagatctatattttatatttgcatttagttaaaaaaataaaattccattccccagatgccattctttggctacaacttgaaaggtatgctttcttctagaaaaacattttttttttatttggaaattagtcttctttctttgcctctccctagcattctaccatgtaggctaagcacgtgtgttgcattttctggccttcactgtttggagggctgtagctctaggttataataatcctttcagatgatcctttcatgtgactaatattgagtgtgatgcctttctcttttttctaaaaaattatttttcattttacaaaccaacccaagtttcccctccctctccatctcctgctccccacctctaccttcccacaactatccacctctgagaggtggtaaggatttccttggggagtcatcaaagtctggtataccaagttgagacgaaccaagcccctccccctatatcaaggcttaacaaggtatcccatcatagggaatgagctccaaaatgtcagttcattcacctcggataggtcctcatgtcactgtcagacccttccaataaatcaagccataaaattgtcaaccatattcagagggcctagtttattcccatgcaggtttcctagctgtcagtccatagtccatgagctcctactatcttgggtcagctgtctgtggttttcaccatcatgcttttgacctctaccacttgttcatatggttggttgggatgtattgtatgagagaagtacaaataaaaaggaaaaaaagaaaatcaaagagattaggtaaaaccagtaaccataataaaaggcaccagtagattttacatgttacaagtttttttaattaatatgatttagatgaagcacactttcccttctgaaaatttaaaaaagaagtatattttgtgaattatataggtagttcttgaatgatgtttatgctaagaagaaagagccctgctatggagccttcattttccatcactgcagaaaacagcctgttagctctgtccagtaaaatgtgttaatatttttccctcacacatgatggatgacagggtttgttttcagacattgttactagccttagacatggctgatggcaaaaaagtttaaaaatatgctaggcaatgatgattttgattaaaatttataattctgaaaaagtgatgtgattggttgtcaagttgtatggggtgatataacaataagtctttgcaagctgcccaagccctgcttccccatgggcactttccatcagccacatgagttctacccgccgccatgttaagatcccaaataacacagagagacttatattaggtacaaatgctgcttggccaatccctaggatttctcacttgctaactaaatcttaattatcataaatacatatattttataagtcttatcttatggaggatgccttccgctgacaccctctcttgctggcggatcacatggcaactccagagcagagaccaggaggaagagcaagagaaaaagggatgacttcctgcttgtccttgttttaatatgagtctgcctgttatgtcacttcctgcctggatcacaagacttctttttatgacatatcccagaatcctcctcgaaccctagttccacctaacttgttgcctcattggtcaaccagtgctttattaaacaataagataaacatacacagaaggacattccccatcagagtggagagccctagttagctttaattgtcaatttgatacatgctaaacttatatgaaatgctaactttgaatgaggaactgcctagatcagagtggcctgtggacatgtttctgacagattgtattgattggtaactgatattggaaggtccatcccactttggatagcgccatccctatggagatgataacaagctatgtgaaaaagctggctgatgggctagagagatggttcattgtggtaataccttttcctgaaattaccttttgtcttaaaatagattcaaaatttgtcaagccttacaatcaagttaataatacatcttgagataatttaaaatttttgtactcactcttgttatcttaatatatactaagtttcattaagtttaaattgcctttaagaaagcatgtaaccaaccttactaagccttgctttcccctatctaaacagattttacaacacaagctaaatgcatagctttaatcttgactatgtattcttctatgcccttgacccataataatgtatgtatatgtgtgattgtggcaatcactttctgtaaacaactaataggttgaaagcaacctcaaaacaaaaaatattccatgaatgttgtaaaaagtatgtggatacaggatgataatatctgtgtgtgatttggtacttgtgattgggatcgatgctgtgaagtggagaaagtgagctaaatagtagcatacacgcctttattactgttctcctatgattgggaaggtagtatcagctccgtcaaggcccctgataccttgaattccccaccactatggactgtaacctagaactgcatgctaaaataaatcctttctctcttaccttgtatttctcatgagtgtttagtaacagcaatagaaaataaatgaaggcagggctgtgacatttcattcaattttgcagtcacactatgatgacccagtgaatgacaacataaatacctctatcctacttcctctttgtccttgaatcttctcaggatttctctcaaaggctgtactcgatttaacctgtgagacaaaggagcctatagatgtaacgtgagctagcctcgtgatgcacagagaaaatggagaaatacagatgatagagatgagcagatgaaaaacagccagtattgtatgtctccttataagaatgtcagtcttggacagtggctctcaaatagtataggccttctccccacacagagcatatactgctcctgggtatgtgttcaaattgtcacggctcaagagaagtgcttctgatcacttgtggtagaggttagtggaggtcagagatgctgcaaaatgtcacactccatacattccttcactgtactcccaacaaagaacccattttgaaattccaacagtaaaaaagtttagaaactgtcattttaatgtatgaatttttccccagatgatccaactataaaagggtcagttgtggggggcatgggaagacgggagggagagggaactgaaattgatatgtgaaataagattgtttctaattttaatgaaatttattaaacaattttaaatgatacatgacatatgaaaaaaatcatatgaaagtacaggataggcttagtaaactaagattggaaagacggatcagaaatgaatataccaaggaagaagggtagcacaatccagtcagagggaataccagatacaaacacataaggaaataaatgaaatgagaccatcagctgaaaggaggaaagctaatgaaatggaatgtagagaaagagagcagtgctccattaataggaaggggccaaatctatttgtaaattgagaccaatgtcttattatcattccttgtcactctgaaaaaagcagcttaaggaggaatggtttattatggctaacaattcagggatgcagtccatcatgttggagaagtcaaggtagcaagagatttaagcaaatggttaaaatataaccacattaaagaagtaatgagtaccgaatgcatgcagctgcttaactcatttcgccactcatattttcagatctcagctgccaactggtacatcacacagtgggtgggtcttttcacctcaattaatgcagtcaagataacccttcatccagaattctcatttcttcctccagactctatgatggtgactctctctggcttccctatccaggcctttgtctcaaaccaccatatctaaccaggtcccaaatctaggtttctgtaagaacttcttccacctcccaccagttacaggtatcttctgtgctgctgcaaacatctctacccaggtagaccttttgcctcttcttctagtgtttaaaccggtgagtctccatgacttccttatacccatgatttctcaccaaccccaaagatctattatggatcccacatttagtaccctagccctccatgcctgggctacaactgatatctaaacattttctagggcctaccctatttatttcccaacacacaggctcttccacatcatattaaacatttccactcatccagctctacctccacacttcagggttgggccaggaggcccattctatataccagcccagtcccatctgtctgacttcattccatacaaacaatttctgatctctaacccaaattgcctctgaatctacttttctttcccacactgctttaatccatattagactttgaactagcaaaagaaattcaccttcctggatctcatggaaaaaaatatcaactacataaaatatcaagttagtatcttctctttaaaatctagaagtccccaagaaatatttgataatgagtgcttattacataaaccagaggccacagaatttacaacaggaatcatagacttcatcaaatattcaaggagcataaaaagacacaaagaaatagctcattgaaattaaagagaaagaacttaaggagaacaaagacccgattgatgtacaagaaaataaaaacataaggttgatgtaagtggaaacatcaaagacaactaaagcagaaatggagatggaataaacaaacccattaattcaactaggaaactcagaggaaagccttataagccgaataaatcaagcagaagatgcaatatcgagatgagataaagcagatgatctagactaaacaaagactatgaaacattttaattaaatacaggaaaggtacatacaggaaatgtgaaacaacatgaaaaaagcaaacttttgcattataggcatagagggagaagaagcccaaattggtggcatagagcagaacttcaacaagattatagaagaaaacttccttaaactaagaaaagacacatcgatacacacagaagcacacagaataccaagtagaaaagaaaattctgatgtcttatcatagttaaaacacaaaatacacaaaacaagggaagtgtattgaagctgcaagaggaaaagactaaattggcataaaaggaaaatatatcagaataacagatgatttctgaatgaaaactttgaaagccagaagagttggagcaattcactccaaggcttaaagactgtgataggcatctaggttgtttccaggtcctggctattacaaatactgctgcaatgaacatggttgaacagatgtccttgttgtatgaatgtgcttcttttggatatatgcctaagagtggaattgctggatcttgtggtagactgattcccattttcttgaggagtctccatactgatttccaaagtggctgtacaagttggcactcccaccagcagtgcaggagtgttcccctttctccacatgctctccagcataaactgtcattggtgttttttattttagtcattctgacaggtgtaagagggtatctcagaggtgttttgatttgcatttacctgatggctaaggatgttgaacactttcttaagtgtcttttagccattttagattcctctattgagaattgtctatttagttttaattggattgtttggtgttttggagactagcttcttgagttctttgtaaaatttggagatcagccctctctcagatgtagatttgggaatatcttttcccaatccgtgggctgacatttttgtcttcttgactgtgtcctttgccttacagaagcttctcagtttcaggaggtcccatttattaattgttgatctcagtgtctgtgctactcgtgttatattcatgaagctgtctcctgtaccaatttgttcaagggtatttcctactttctcttttaataagttcagtgtgcctggatttatgttgaggtctttgatccatttggacttaagttttgtgcatgtgatctatctgcagtcttctacatgccagcatccagttatgccagcaccatttgttgaagatgttttctttattacattgcatagctttagcttctttgtcaaagatcaggtgttggtaggtgttaatatcagggttttcaactctattccattggtctacctgtctatttttgtgccaataccaagctgttttcaggactcagatgcccctcaactgaagaatggatacagaaaatgtggtccatttacacaatggagtactacacagcggggggtggggattaatggaatggatggaactagaggaaaccactctgagcgagggaacccagtcacaagaggaggacaaatgtggcttgtactcactcatatgtggattttagacatagggtaaaggattaccagcctacaatccacactttcagagaacctagtaaacaaggaagaccctaagagtgacatacatggtcccctgaagaagggtagagagacaatatctcctgggagcatgggggaagtggagagggaactaggagaatagaagtggagaagaggaggggtaaggaaaacatgatgggacagggaagttgagttgggggaagaacagaagggaggaaaataagacatactataataaagggagacattataggtttaaagagaattcgggcactagggaaatgtctggagagctacaaagatgacaccaactaaaaatctaagcaacaaggaagaggctaccttaaatgccctcttctgataatgagattgatgactaattcatatgccatagtatagccttcatccagcagctgatggaagtagaagcagacacccatagctataccttgaactgaactgaaatccagttgcagagaaggaggactgatgagcatatgggtccacagcaggctggtgaaacccacagaaacagctgacctgaacaaggaagagctcttggtccccagactgatagctgggaaaccagcatgggactgatccagaccccctgaatgtgggtgtcagtgaggagaccttggaaatctatggggctgcttgtagtatatcagtattatccttagcataggaatggactttgggaacccatcccacatggagggatactccctgagcctagatacaagggggttgtcctagggcctagcccaaagaatatgacagacttttaagaccccctatggaatgcctcaccctccctggggagctgaaagattatgggataggtagggtgttagttggaagggcagtggaggaggggagggagagggacttgggattgacatgtaaaataatcttctgtctaattaaaataaaaaaattaaaaaagactatgataggctgccaagactaatatactcagtaaaaagatccaccataatttaagcagaaaggaaaaatttccatgatattaacaacctaaaattttacagtagtatagcaatcataaacaaaatacaggaagcagtacttgagttgaagaggggaatgaacttagcagagagactatggaaagaaattcaaagtaccaccaagaacacagaatgaccaaaaatcaaaagaggatgggcacatgtaagacatttcaatgataacttcaacgattaatgacatcaaaattctccaatcaaaatacatatgcctattgaataggccaagaaacaaaatccatctatctgttttctataataaattcattttagctttaaagatagatggagccttacaataaaaggttggacaaaatactccaatcaaatgggacaaagaaataagcagatatgtctatactaatatctaagaaatagtctacaaactataagtgaacagaagagataaagtatgacacttaattccaacaaagtgaagagttaaccatacatattcctattctaaacatgaatgtacaaaatctggtgaacccaagtatataaaatattattaatggatttaaagacatttattaaagtcaattcagtaatagtatgtaatttcaatattccatattctccaaaagatataatatccatgaaaagtaaatcagagtatcaacattaatgataccacacatcaagtgaagttcacaaatatttacaaatattctaccaaaacccccaaagaatacagcagcactcagtcaaaagattttctaaactatacaccatgtaagacacacgcccatgctcacacatgcacacacacacacacacacacacacacacacacacacacacacacacactttaaaattaaaaaagtttggaagcacctcttatatcatattaaaccataatgcaataaaacttaaaattgtcagcaaacaaatctctagtaaatatacaaacttgtggagattaaacaactaattaccaactgatgaatggaccaaagaagaaatcaagaaagacataaaaaattcctggaaataaattaaaatgaaaacataatacagcagaatttctggaatgccttgagaaattcgtcttacaaaagaaatgtatagttctaaactacctgcattaagaaaatcagaaagaccacaaataaatagcttaattatgcaactcaaaatgttggaaatatgagaaaaagctaaatccaatttcagtcaacagtaagaaataataaaaatcagagcagaaatcaatgaagtagaaacaaagaaaaatgcaactaatcaatgaatcaaagcttaagtactttgaggatataaacaagattggcagacacttgtctcagctaatcaaaagaaatgcacaggggtatccatttcaacagacaaataaggcatctagaatattataatgaaatactgtgtaaagacagaataaaactacaggtcaatatctgttgcatgagttctaatttgtctttataataagaccaattagagccagatgcaggggtaaatgttgaaagatgagagaaacaaaaaatcaagccacagccacaccttaccttgccaatttccaaactaaaaagagagaaagctcctgtctcttccctgttttgtcatttcacctctctacccagacatatcacttactgtcagtctctatagacctttagacctttatggttaactcgtggctaggtctgccctctgatcttcaggcaagctttatttgttagagtgcaaataaggtatcataacaaatatccctgatgaacagagactcaaaactgctcaataaaatacttgcaagcataatactcacatacataaaaaagatcatacccatgaacttggctttatctctgaaatgtagggatggttcaatctactcaagtcaataaatatactaaaccatttaagtggagttaaagacaaaaatcacatgattatctcaataaatgcaggaaaagcccttgacaaaaccctacaatattcattcatgataaaaccctagagaatgtacggataaagggaacatccctcagcataataaaagttatatatgagaaacccatagtaaagaagagcttgatgaaattcagtcaggaatgaggcagagatatccactatgcctatttctttttagtattgtgctcaaagtactagctggagcaataaggcaagagaagaaaataaaggagataggaacagagaaagaagtcaaactatccctgtttgcagactatatgacacggcattagagatcacaaaatcctatgagaaaacttctagaaatgataaacaaattcagcaatgtggaagaaaacagactcaatgtggacaaatcagtaggttttctatataataacaacaaacatagaaggatatcatgcaattcacagtagcctcaaagaaaataaaatgtacataattaaggaagaaaagaacctctgtcatgaaaatttcaacttctgaagaaacagttaaagacactaaaaaatgacaagacatcccatgttcatggattgatagaattaatattgtgaaaataaccattttaccaaatgctatttattgaattgattgaatgcaattggaatcaaaatccccatctgattcttcacaggaaaagaaaaacctgtcctaaaattcataagaccctggatatcccaaatatcctgaggctaaagaataatgctggagggattactcttccagattttaagatctattacagaggcataataataaaacaatatagtactgagacaaaattagccatgtagacaatggaagaaaattgtagacacaagtgtacatataattttagcctcctgatatttgaaaaagatgccaaacatagaagctaaagaaggaaagcatctttaataaatggtgctggaaaaattgggtgtccatagacagaagaataaaattactcccctatcactttacaaaaacactcactccaaatgaatcaaagacttaaacatgaaaatataaaccataaaactactagaagaaagcataggcagaatcctgtatgatatatggataggaaagtacttcctgaccaagaattaagagaaacaattgataaatgatactccaagaaactaaaaatctccttcttagctaaagaaaccatcaactgggtatggagaaagcccatataaaggagagaatctttgacatctacacatattttacataagatagggaattaatatatattaatatatatattatattattatatatgcaattggaataataatccccatctgattcttcacaggaacagaaaaatctgttcatataatatatatatatatatataatatatattatacatatatatatatatatatatatatatgtgaaaaacagagtcaacaagacaattggcccatttaaaaaaatgggcctgggaactgaatagagatatagaaagatttcaaaagaagaaaacattgctaaaaaaataccaaatcaaaacaaatttgagatttcattttaccacagtaaaaatgacaacaatcaagaaaacaactgaaaacacatgctggagcaggtgtttgggaaaaaaatgggaaccttcattcactctttgcagggttgtaatgatacagccactacagaaatcagtgtggagaattctcaaaaaaaaaaaaaaaaaaaccataacaaatctgcctcactaatccgtttgccatttgtatatagtagggttactgatttgggggtgtaggtgtatacaatgattgaaaactttctttttggttctaatccatttgctgttctttatggtttttgtatctgtatagccatctctttaattaggttagggaaattttcttctatgattttgttgaaaataggttctgggtctttgacttggaattcttctccttcctctattcctgttatttgtagatttggtattttcttaatgtgacagattttctggatgttttgtgtcagaaaatttttaggtttattattttcattgaccaatgtatccatttttatatcatatcttcaattcattaaattctttcttttatctcttatacactgttggtgaagcttgcttctgtagttcctgttccaattcctaaatgattcatttcccaaatttccaggtttttttgttttgttttgattttgattttggttttggttttttgttttttgctaatgcttctacttctattttcaggtcttaaatggtgtcattaattccctacaactatttgtatattcttgttgttttaaagggattaatttatatcttctcatttttgtgtgtttttccagattcttaaaagtcaagcattcatttttccaattgtttgtgtttttctatgtttttacatgaattttattcatctcatttttaaagacctctatcatcttcatatagttggttttaaggtcttttccttgtgcttcagctatgttggaatttcacagcctgccgtcacaggaaagctgtgctctagtggagacatattgctatggccgttattgattatgttcttgtgctggtgctaggcatttaggtttgtgatgattatatgtttgggtgctgatttctgggtttgtctttgttgaatatgtgtttcattccttgatttctgtttcttctccggagtttcagattggcctgctcaattggtatcttcacagggagtacttgctggcgttggaggctgggatgcaatgaatagccgggtgatggtggttaggagggaatggtctgttggatccataggagttatggacagggggagagagaagctgcagatggtgatctgttgtggtactagggacacatattaggaattgggtctagggacacacacggacacacggacacacggacacacacacacacacacacacgagagagagagagagagagagagagagagagagagagagagagagagagagagagagaggagaaggtatgcaagtatcctagtttgttttctgacagacatagcatgtggttgacaagaggtacctgcttgagttggggactaggatatagctttgaatggagggagggggatcggaaactgcaagtggtattctgttgctgcactagagactatattgaaggattaggtttgtgggagtagttatctaattagacttaaaatctgctcaacaaggggtatattatgcttagccctggaaacttatggaactactcagggctagtagagtcatggatgttggatgagaacctacaactgctgctttactaaactttatatacactctaaatatttatctttatactcacagataacagtattccttactcctcactgaggattttcctcttttcaacagacagaaaacataagagaaatccacagccaattaaaatccagcattgcggagcttagtcctagtgaatacttctacaaaacaattctcacatgtaaggctcagggaatattttggaagaaataacagaaagattacaagagctagacaatcatggactttgctgtgagtctgtctcctaggcatgtcagaatctatatcataaaatttcgccaaaatgacttcctaaataccagctgagcaaggacaataccagtagacatgccaaagtgtatgggggaagatccagaggcctcaaacctacacaaagaactacagacaactaaggaaaactgagagcaagagaagggatagcaataacaaatagtcagtccccaaaatgtacaaaaatgtagaattttacagactgagtaggttatatttaggaatgtatatgtatatacatgcacaaatatgcatgtaagaacaattaataaaaaggagggttatgtgagaggtttcagagtgagaaaaggaaatgaagaagttatataattatattatagtctcaaagataagagaaaccactatggtgctgtaaatgagaaagctccccacaggttcatgtgtttgaatttgaatgcttcctgatccatagttggtggaactgtttgaagaagatcagaaggtattaccagtcagaaaaggtatgtcttggggagtaaatgggcttttatgtttcaaaagcccccctctctctccctctctctctggctgtctctgcccccagtggtttttgtttcaagatatgagctatcagctactgctccactgtgatgcctgcttgattgtttgcctgctgccatgcttcctactattatgaccacagactctgaaacaattcttactagcctatttctcctataagttgtgttggccatggtgcctttacagcaatagaaatacagctaatgcagttcatcacagacatgctcagaagttcatctccaaggtgattctagattctgttgagtttgtaattggcactaactatcagcaccccttgagttcagtgttgtcaggcctatacatagaaatatctgaggaaataggagccaattggacatattagttacatcagtgtacagcaaagccttgtctctgttagcatgttctagagcaagatgttgcaggccctttccacaacaggcaatacaatataatgatcaaagtactcagtcttgggagacaaattacttgggtataatttcttcttttttctcattatctgtatgactatgaacaggatagacttcctggctcatttccatcatttgtaaaataggacttattatggtgcattactcattgtgtatgagaatgtcaaatgttttaaaaatggaaaggatactaggatattacctggcacatggtaaccatataatcagcacaatggtactgtaatcattattattgttattttagttatgaaattacttcaagttagcaaatttggtgttgcttgatattgtaaatgaagtttcaggaaaacatagccatgcttatgcttatttgctacattatctctcacaagttatgcattatggaggcagaattgttggtatagactttatggcacacaaagctgagaatttgtgattcccaatctttacagactccatttgcaaactcccattatgaatttaaataccactcgctcatggaccttagccatcacgatgtccttcaatagttcctcaggatataatagcggttatcattataaattctgggttttgattctacaatggaatcaaatacaatggaaatctatttctggattgaatgtgaatttacatgtgtgtgtgtgtgtgtgtgtggacatgtgaatgcatacaatcacggatacacagaggttcaaagagagcagacagaaatcagtgtaagttatggtagctcctttgagtcatggtgataacagtgacataaggcttttaaatttgtgctggagcaactcacatattttgaaaaatttaggtgcaatagccaaatacagaggaatgagtcttcttgttttgtcttcctcattgtgcttattaatggcagtgtgcggagtatcccacttgctgcagggaaagtctactagcacttatattttacctttctaaaaccaggaaaccctgagaaagatttctttagactcaaagatgggttgattcagatctttttcctcatggcactctggtgaactttagaagcttttattgatgtgatggttctttagatccagtctgtcacagggtgtttagttcaagtacaagtaatcaataacaataagctctatttatccagcagttcacactggacaatggggataggaagcacatgaaatggtggacatgggcagtgggagagaacagaagtggaaactataagtttgcttttcaatctgtgtgaaagtcttattttatacagcaaatatttatggtaaaggaaatgatataggaaacagtgaacctgaagagtggcctatgccagatatgtgctcttacagacatgaatccatgtaacatttctcaaatggtagctaaagcttacatgtgtcttcactaatgatgtaccagctcttggcatttccttggctcaagttatattttctcttggtatttaaatttcattatattattgttttagcacccttgtgttctatttagttcctttgtgaaagatacatttcaatacaggctggagttgttcctgtgcagtcttcaccatagggaaagcctgataactctgggctatccagtcccagcagattgacagaggctcacgggaagcagcaagacaacttttagatactcggtgaaagtcaaccttttaataggatttgttgcctcgtgatttagaactttccaggccatctagatttccagaatggaacaaactgcaatctgtgagggctttttagattaaaatgtctcttgtatttaatactgccttagaaacaaattgcttattgctgaatctgatattggcaatcctcaaataaaaacctaatgtttctttagatagtgatgtaaaaaacatagcgacccagttttttaaaaataagaagcaaaacaaatttcaaattagttttgaaaaaagaactaaaagtttaacatatctatggtatttaaaattatgtggtcagggaaaaattcaagaggcctcaaccctacacagggaactataggcagatgagaaaagttgggagtgggggagctgatattccccagggaagagcactccaaattattgtccagtgccaaaccatcagcccttaaaacctatgtacaaagtaagattatgtggacagagcaggttaaatttaggaataatatatatccatgtacttgaaaagaacaagagggggatgaggatgtttagaggaaagaagggaagagagaaacgtaattatattataatatcagaaactaaaataaaagtcattggtcatttatttctttgcaaaagttactcagcaatttgtaacaagcagttaaagactggatgggggaaattcaatacactttttactacctgaaagtcaagccgaatactgtcatgttaaaaagaaaagtggaagggggtgagaggagagaacaaaaatattgcccacatatattatcatgtcaatgtcttttggttagtgagtggcttgttatttaaataggaatgataaatcaatatgtgaagactaaataaatccatcaggatgaaagaaaaaaagacatgaatgatctttaaaaatttaaatcaattgtgaaatattttactttctgattggcaaaaaaacaatggtattacacgtcactaatgaagtcataaagaacttgacattgatttttaaagatttaaatcaatatttttaacctaactttttaaaacaatcttttcttttattttacatgccaatatcagttccccctccatccatcccctcctcaggctcctcccaccttctctccaccttcactccacccccatccatttgtcaaagatagtgaagcctcccatgatgagtcaacaacgtttgtcccatcaccacagtggggcaggaccaaggccctcccccacccccatatctaggttgaacaaggtatcccttcatagagtatgggctccaaaaagtcgattcatgcactagggataaatcctggtccaactgccagtggtcccataaactgctcaagccacacaactgacactcacaattagagggtctagttctgtcctatgctggttccccagctgtcagtctggagtcagtgagctcccattagctaggatcaattgtttctgtgggtttccccatcatggtcttgaccactttgctcatattattgcttctccctcttttactctcttctactggattccaggagcttggcccagtgcttagctgtagatatctgcacctgctttcatcagttactggataaaggctctgtgatgaaaattaagtagtcatcaatctgactacaggggaaggccagttcaggcaccctctcctctattgcttagagtctttagctggggtcattcttgtggattcctgagaaattcccctagtgctaggtttctcaccaaccctataatacctctctctatcaatatatctctttcctcactctccctctctgtccttctcccaactggatcatcccattccctcaagttctcctctccctcccctcttccccttccccttactcccaagcttcagatttactcaggagatcttgtctatttccctgtcccagggggatccatgtatgtttcttttagggttctccttattatctagcttctctggggttgtggactacaggctggttatccttggtttatctacttatgagtaaatacatactatgttcatctttctgtgtctggattacctcactcaggatcttttttttttctagtttcatctatttgcctacaaatttcaagatgaaattttttttaccactgagtagtactgcattgtgtaaatgtaccacaatttctttatccgttcttccattaagggccatcgaggtggcttccaggttccggatattacaaataatgctactatgaacatagttgagcaaatatccttgtgttatgaatgtgcatccttacggtatatgtccaaaagtggcattgctgggtcttgaggtagattaattcccaattttctgagaaatcaccatactgatttccaaagtgtctgtataagaacttgacagtgttaataggaatgaatggggacacctccccttgaagcacagttttgaaaacactgaattcacctgatgtttttactggaaatcctgtttctaggaatctgttttgtaattacacctaacatgtgcagacttatgtttgtaggaacattagtaaaatttataaacattctaaagtgtccattgataggaaaaagcctgacaaaggttggtattttctaaaatggataccttagggttattcttttaaatgaggcaccttcctcattccatgctggaatagaattaatcccaagacacttgttaatagaacaaaaaaattgtaggacagggtaaaatagggtacggtgatctaaatggaacatttaagaaaatatagataagaatcttaactctctatagaatagaggaatgattattttactgtttacttattctggtagtttgaataagaatgacctcatgggctcatgtgtttgaatgccatcagggaatagcacttcttgagaaggattagcagatatgacctgttggagtacgtatggccttgttggtttggtcatggtgtctattcacagcaataggacactgtctaagacactttctatttttattattttgaaacaggatctcactgtgtagccctgactggcatgaaactcaatatatacaccagatggctttgaattcatcacagagatttgcctgtctctgccttctcattgctgggattaaaggtgtgtgccactaccctgccaggctatttttattgttcagctactttccatgtgtattttctactttagtcctaatagtaaaatctagtgaagaatgaataaagcatacaatgtaacaatagataatctgaatgctataagttgtaaaattaatatccttctatggaaagtaggaaagacactggattttgtatgacaaaaggaaatgcacaaagtgtttatagacagagcatctgacatttatgtcactttccaattcagatattgaaggagttcactagctagttcccttttcatgtgatggtctctcaattccttaaattgggttaattactttttattctccattccttacaattgtccctaaaaggttaatggagacaaccctataatgtctgtgattatagaaggaagaattatgaaattctttactgccaatccatgtttgtctggtttagatgtgtctaatgatgtgcccagctgccattagccctgtcttttcttcattataatgatgtctaacttagttgttaaaattctcctaatatgggcttagcatatggtagatgcctgatttacctaacattttgctcaagctgtttaaaggttggtcgttgtttttctaaagcaacactaatacatgggagttgtagcttcccagttgcttcttggcttttgcttttctccttgactgaggtttccattgaattcttaagaagcaaccatttattgaaagctcatgaccttacataaaatacatccggcaagtgtgtttctccagtgttcttgttgagatgaaaagcattttaaatgcattcagatgaacatatgtaggtcagagcttcccacttgatttgcattaacttcaactagcttctggtccatagcctgaaagtgtagtgagcccaggatctttttttcttcttccaatttttaatgaagacaaatgatccagtgtgtttagcttttattctttaagataccttacttttattcaacaacaaaccttgagttgattattcccagcatatctcctataccctttcaggatttgtactttctaaaacatatttagccagatttatttcagaatatatttttcctattttaaaaagtcaatacagttaaattcagatattttattttaaataatgacctcagtaagatagcctcataatcacatgtagggtttctacaataaaaatattaaaaggaaaaaatagatatttattcaaatgttttgttaccaaataaatatgctgccaattaaggaaaaaaacttagattttctaagtttctatatattgaaattgtggatagtgggtaatgcagtcacattaaatgggtctaaatagtgtgcagcagcatgaaaaagccttctctaatggcttccacaaaattgatggcctagtcatcttttctcctaacttagagaagcagcatcattaatgagttacagttcaagaaagcacatcagaagccagcaaacatggaagcacatcactccccataccagctgggaactgtgtagaggaaaaactacttcagctgacttgaatgggctgttatatcggtgagaacgttaaactctaagcctctcaatgaattagtgaactttaattgaaatagttgagctttgaccttgagggttaagatgtgaactagactcaaggctgtgaggccattaatgatcttcaccctggttatggcccatctgacatttttagaaagtatcccgtcatgtggtttaaaatggtgactatttcagtgagtaatgttgaatttggtgtttctgctgacctcattgattaaaaggtatctgctacatgacagaaattcattttgaattggtctaaaattttaacaaggggcactgccctaatcatctggaattataacaagttgtggacagaaatagttcaactgagagaaagacttcacatgtccaagtagttctgtaaaaatatcatcttttcttgatggtttgaatgtactaatattgatctctgatagtgaataaaaaatggaaaactgcagtgaaaagtactgtccagagcattaagacccatggggaatagaaaagttccaggtaacaatgcttgtgaagtccctctggccacatgacaaccctcaatgaaccctgtcaacaaaatccacttcctatgcccactgtctttagcttctacacagatatgctgaacatgaagtgcttttgcctctaggccacatttacactatcgccacagccccatcacttcctgaaagtcaacccgctgatttggctgttttgtttctgtatgagtgtaagtttaacttgtcttccccatgctccctacccacatcagctctgcctgtttgtaggatacttaatgtcatccaacatttctgtccaaataagtttcccagatagttgttgtctagaaatctccccctcctccctaaatattgccatttatctccatgtggaacctgaacaaattggatccatttcaatcctctttgcaaagaagttaagacaacagtagaacttcaatagaagcagaatcttttggctttcccacttaccaattgtgaaattttaactgagctccatgacttcttcagagttgaagttttccttccatggaagtagacagtaattgaattaagtgacttgccaagacttgccaaacttggaaagcttcttcggctttgatttttcttgtcatactggtcacaccgactattctccatgtgaagaagcagagaagattccactgaatagttccttttcttctccaactgttgccaattcacccttccatgctagctgttggctctttctgtcttggcatgtattccaggcttattacatgaagactgtacatgtgatcaacatgtaattagagtcggcataagagcatatgtatgtttctctgagccagatgcttgagcagtaatgtttatttggtcaggcttatgtttgagaacttggccaatagaattaatcatctgggaaagctataactcaataagaaaccacatgcattgaggtatttttcttaaaattgtttcttaccctttggttcctaatagcacattttttttctctgattcttcctacaagagtaattactgacagttggtgggaatacattaaaaaataaaaagatgaagggaaaagaaacacttgtaaaaatatactttattctctagaactaccgtaatactaaataacagcttaggatctgatgtgtgtgatttgttttcctttgtgcttatccatacataggacttggaaggaaaatgggtaagtcaactgaaaacaaaaatgttgaaattttgagaacatttactaataatgttattaacacaaatttaaacaaaatggatgtatagcactaatataaactctcaattaatactagaatctgtgactttatttcttctagaagatgtcactcagagttatcacaaaagtattcattgaaaaagagtgctcctagttaaggaatacagggaacatttcatctgatagatgtcccaagataaaggtacaggtaagatttgttacaaaacaaagcagcaacaaagaaaagaaaaagaatgaaagaaaattataaagctacatctttatgaaaacaatgccagatgggatttccaacatatgaataattagccttatgtaaattaacataacctcaccattttataattagggatgaagcaaaagttatattctgaaaattacttgttcatgttaaataatagaatttatgtttagggaacaataatgcatagggtttaatgctttactactctatagtagtcagttttccagtcagtgaaatggaatatttgccaactactagttgaaataagatgtcagcaaatcttgtagaaacattaataaaaaataagagtacagcaaccatgactatttctttttactttttattgattaatgtaataaaagtgattcatgcttatgaaagataatttggagaagaaatatgattggtacaccccaaggcttatatttttaagaatacatcaagaacagatgagattcaaatattttattcttttgattaggaagagctcagttttcactcgatgtttttgcctaaataattctctgtgggaatctccaatgtgtatggggggtcataaggagagttttactctgtggcactctcattctttctgctctggaagcccagtgatgactgtttgctttcctggtctgggaaaatcgtcactcagccagctgtaggcctcttgtctctgcctatactttacttcctttaatcccttgtaactgcagcatctgtacagattcttatctatgtatataactagagaccagagggtcctttagcactgggccttagctcaccttccttggtggcattattcacagcaactttctcagaatcaccatttctctactggctcctccagcttggctgatgtgatggccaaagatggctgctgctgttggaacaaaggaggctgtgcacttgggaactggaattctagctaccacaacctccagagatcatgtagcacacaaggaatgaatacctctgtttcttttacttttgttctgtgaaaaacatgacctattcccatttaatttggattactagacatgcctgacagacttcctatgaatgtgactcaagttctttcttacatggcctaaagcctaagtatctctaatggttccccatagtcatggggttactttctgccatgtgtttacacataatcaagaatagactgaaaacatgaaatgaataatttcagaaataataaattcttggctctgaattgtacattttgtcttgcatagaatgatggattttttttgtctctgtcctgcactattttgctaatcatgagaattacctatctatgtagctgatccagaccatgcacactacctgcctgctgtcctttaacagccattttagttttcagaatgattggcttggtgtcagtgcttcttactctcttaaatatggtagcctgctgttactcacaatgcccatacagttcactttactttttctcatcatgttagcttcattgcatgtgatgtaagcagcataagggtaagaatactacaacaagaataactgagagaccatgcttacatgtatcagagtcaatgccatgattgttctgttttgttacttatcatttcccatgatcacttatgaattaaactttattgtaagtgttgtattttactaccacttgatgatttaaatgtgttggactgtatcacccatgagtagggagaattattgtgtttgtacaatagttcgggtaatttttagaacagagggtaaggcagctctttttcttggagcacaccaagttattataaccatgtctcacttcaaacactgcaagggccttcgattgtctttctagttattttcaattttctacctccaacagcgatgttcctcacatattttccttgggctgtgtttcttcttttccttcatcatcttcttcctctctctcttcaagcactcccatctgcaccaaaaactatcaggggtatctgtttgatggtgaatcaattgcgatttacttctgaccttttaaataggatcattttgagaattggaattaagaaagtgaaagaatatggagttttgattcatagtgtcgggggagtccatggaaagtcctgtttgcttgaaataaagacgggaattgagatttttgtctagagcagatgggtaaagaatgtccccctttgagacagagaacatttccagaagaacaggtgagcagggtcaaaagtttagtgtaggtggttaagaacccttcctgaacaatcatgagaaccagagtttggatcctagcaccagcatattatgtgccctgtaaacacaccaaattcatttcagagggatggaccacacactgtggttttcacatgtgcacagaattgcacacacccacatatatatgtgcccatgccccaccctcaaataaagtatcttattaaaaatccagtttcaagtttagctatctaatgggtattgagatgcaaaactggggcacagaattataggatctaaggcttgttatcataaaccttaaaacaggacaaggtcactaatacaatgacacatatacataagatgtaattttgggcaattgaaaatacctttgccagatatttataatactgatatagatatagaagtattatgtaaatccatgttattagtgttattgatgttcccaaggtttgtggtcacattgcaatttaaaatggctgcttgatttatggtctctttatctgtctacaaaactatccatctctttcaaaaacacacacaactgggcatcagatattcaggactggtaaaagcgctatgcatatctgtagacctgaagatggcatttctctaagattatgagcaattcagagacattcagtttcatctggatgagatcattaagaggagtttgactctgagtttaaaagattaactttccggaaactgtccttgatcacatagccactgtagaaatccaatggagattttgactgactgatacttgtcaagggataaagagaaggattagtgctctgatgttaactcatgttagactgagtcaggtcctggcagtgttaagaaaatcaggaaactaaacaaactcccttataaagacaatgttccatttatgaacaggtaatgattttgtacgtccatgctttagttatcattacagccacttgtatttgtaattgttaagaacttgactgaatattgtgattttgttaagtattttctctgtcctttgatccagtgacccacatatctcctcttttaccatgcttagagagctaccttggttccctactgccccaggaaatgagacaatgactgctaagtgaccattctcttcaggacaccactttcaggatagaggaggtagttgaaattcatggtaatactatatctttagagaccatctttctcttaggagctttcgtattttgtaagctttcagttgaaatctctgcaggactcaggcacaacttgtaagagcaataacccacacaaatacctataaaccttaatgacaggggtcagtactatcctaggaaggaaatgtgtgcctggagtgaaaccttcctgattgatacaaaaactctcctgacaggccacactactgatgcccaattgtctcaaaggcctgggtgggtacacctccatacgccagttctttgtgacatattagtcctagactaatcaccaattgttgacagacaggctacatcaaatcaactaaggagatattagtggttttttctattctagccaatcttgtagttgttttcttgactggttataaaatgaaccaacattttgggaaacacactgtcaaagtagtacagcagtaagccagtaggaggcagtatgttgcagtgaggaagttgattttgaaagcacatacagctctgcttttcctcttgctgtctgacagttggcaagttgtatcaactggaaggtaagttttctgtgtagtaagtaatagttcctgattctataggttattctactaattcaatatgatactgtgtgcacattatggtaatgagaacctggcagtgacagctcttattgtttctaccattcttggtaactcaaaagagaatcacaccaccatgcccaccccttccattggaattgtgggcctgttatctccagctctgcagggatggtccccagcacacacatgcttacatgcatggagtatgtgggtgtaagatatcaccatcactgtctgaaataccactcctttgtatttttcatattttgaaggcataaaatattgttttttcacttttaaggttttaggttgtttttcctcagaccaattgctggtcttgtcagtattgagttctgagtgagaacctaaacattgcatatacagactctatcacagatacactcaaggtcagcatggaaatcatgtcagatatcatattcagtatgcagactccaccatagatacactcagcattagtgtgcaagccatgtcagatgacatattcagtgtgcaaagcctaccacagacacgctctgtgttagtgtgaaggtcatgtcagatgacatacttggtatgcagactccctcatggacaaacaccatgtcaatgtggaggctggatcagatgttggactctgtgaatggactccagcttttctccacagggagacagaagaacctgggggctacttccagaccccctcccaaaatccatgaatatcatgtagaaacttcaggagcaaaaacccttaagattttggtgatatgtggtttacaaacagtttcaacctacctaacagaccaagacaatatacatgcctcttaggtttgaaaggattgaaaactccaagacaagctatataacccagcccttgggtgggaaatagggggttaacagcaggggaaggagttatctgccagcatttgtaataatgttttataggcccagcaagtaataccaagctgggttccatttgacacagttgagcttaccagcctctggacagattcatccctcttaattctattttctccaaaagtgggtaggaaaaggcagagttggaaaaagcactcggtgatgacagtgacagcatatacacagtaaatcagtatgctaacattatcagcatggttcagagttgttgcagtaaaactatgtgacatacatgtttaagtattctcaaatttccattgtgttttctttcaatacttcaatttactacttcattacaattcaatactttatgcacttacacatttattcaccaaaatgtccttgaggcactttctataatcgaacaacgagacattgagaaatgcacatacccctgggcactcacagtccagtaactatcagaggataagaatgagggcagaagctgcagggccaggagctgaacttgcttgaaatgattttagaaaagtggagaatatttccatatagttgatctactgagtaccagaggtggactggaagataaaggagaatggagggagaaataaactttatattataaaaatgaggaagtaaaggatattgccagattaaaaaacagtgtgtttaaccaataatttgtaccctttagcaggtattgaaagaaagtgggggataaggaaaataatggacaagggtgatttagaaagtcatgaacaatcactagaagtctgttatgctacagtcagaattatgtgtgcttccataagaatagctttgaaaactgggcatggtgatgcatgcctatgaatctaccacagggcagctaaagcaatggctcctgaatttgaactgcatagtgagaccctatttcaaactaaacaaataaatgtgaagcaccactctgcactactgtgtacttataattgctatattttccagatcaagaaattgaggtttggggctcagccaccaggagcactcctgctcttacagaggcctaagttgggtttccagagcccatattaggaaacttacagcttcttgtaagcttgcaactccagttccaagggatccaacatcttctggcctctgtgggcaccagacatgcatgtagtacacataaattcacacatgtccacacacacacacacacacacacacacacacacacacacacacacacacacacacaaatctaacaaaaaaataaggaagttgaggtttgtcaaggttataccactcatccagcctcaagttattgcatgacaaacctacagcataaatcctgggtcctcctttgtaaaagggccacagcactcttgcctctttctccttgactgttactggagaaagttgcccaggttggagggaagatggtgaaaatgtgttgggaacttgaaggattgaaacaacaaaatgaaagatggtggaactgcaacaattgaacaagaccctgatttttaatcttcctgtcaggaaagacaaagaaggatggtcaggattaacacagctggcagtctccacagccaccatcaacagcatcctcttggaacccactcaatagcactcagtcctgcccctgccatgtgactgacaagggaaatgctctgcttcctgaacacgcacagcatggtgagctttgcaaataaattattcattcaaatcttctgacaaaaaatgcatggccttctatccagcagaagcctgtgctgagggggctggaaaggctgaagcgatgggaagctgctactgctaaccgccgaagatgcaggaataggcttgaaggtaacagtcactgcataaaggcaacctagtgaaatgtgcactaaaaagaataaaaggcagtgaacacaagtcagagatgtcaaatgcaaactcatttggtatgtatgggcattgggaaataaagaaagattcaaattttcttacatgtaattgcttttaaaaaaaatcaaattactaacgactgaaacgatgactttgatgagtcctcagctgcatttgataacattactggaaagtggagaagccacaggacacatcaagcagatggtgtgtgaaactggatccccaaaggacagagggaattggggacttgtctttcatggttatccttagatcatcaacaaaataaaagaaaatgcagataagataaatgaaacacacgtaagacaggccttagcatttcaaaatattacaaatatagggaaaagtataaatgtcttaattaaatggcataaagatattaataagcaactcacacaaagaaaaaaatgaaatcaattacctggtataatttcatataaaaacattccccaaagcaataatcacagaaatttgaatggacaatttcatatattgcgtatttttgcaactcagttggcaatttttcttacacatgtaatactattaacaagtgtgttaaagacatgagctgctttctacacgctatagcatcatgtgcaattgggaaccagagagacagctcaatgggcagcatgggcacctggatttatctcaatgtgcacataaaaatgactaacgtgtgcagggctggaaaaatggctcagaagttcagagtgggcagtgttctttcagaggatcccagttaagtccccagcacctccatcaggaagcttatgcctgtaactctatttctaggggatctgatgacctcttctagtctccactgttatgcggtgcacataaactcacagtagagcactcacacatgcatacccatttttaaaaataaaacatagaaataaacgttggttctgttaagtgcttgttaaccccagcatcatgggggttggaaacagactcattactggttgccagcctagctccaggttcaatgagatactgtttagtgtgaatatggcaaagagtgatagaacaagacaccaaaagccttactgtggcttcttcacacacaaatatatgagtctgtctactacacatgttcacatatgccccccccagcacacacaaaagtaatattgtcatgtacttttggagaacccattttgataatatattaacatgtaaagtaagggacttaaaaacatttgttttgagcagctcccatcaagaaattcactctgggaagtggcagaaatagtggacagtatttgtcattgccaggattgttatttagcaaacacctgtaagactacttccacacatagcacttgttgagaagtaggtaatatcatcactctcatttgacaagaagaaagagcagaagttcttagacataaattaatttactcagaaaaatcccttggaagacaggaacaaaaaaagaattagagtgcttttttctcaaaaaacctactcagctgtttgcaggattgatggacagtctccattctggatgaatgctcactacatgctgggagattgtcaccagtgcactgccctctactaaatccaaatcttgttgtttctccaattttgttatgtgtttatcaacagtgggctgtttctcttcttgtgccttcatccaggtataattattactgttgttgtacaatttaattaaacactatatgaatttctagcctcatgtgaggatgaaaggataggagttttgtttttatgacagccaagttaaatgtgttattttgagctgcgaaaattaagaaaagaaaaaaatcaagttactgctgaataaaatggctacatgacagctggaaaatatccgaaagattttattaactaccattattcacttcataagtgatggcttcctgttgaattgagttccttcactctagttctagttaagtgacaagtatatatttgttatttgaagcacagtgaaaatcagaaagagtctcttccatatgcttgtgttctaactattccttgagcctgtaaatgattatattacatgtcaaaataaaaattaaggtttaattatattaaagttagagatggtatctaggttagtatgggcatacccagtgtaatcagactccttcctgaaaagtaaaggaggatttcagaagaagagttaaagaaaaatgtaatggcagtgcaagttcagagtcatgttggatgagagcatctgatagttcacctttgaagataagggatgggaccataagccaaggaacacaggcaccctccaatagctggaaaaaaaaactaatctaccctagaacttccaggaaggaattcagtgttgctgaatactaccctaccatattaaaaataaatgaatatctgaaaaataatcagtatcacaaacaaaaatttgggcaaaaccctttagcagattcattacaaaagaaagtttacaaatgacaagtagaaaagatattcaacctcatcagggaattgcatacttcaccagtagtgaatggctcagtgtgtccactaagggctgtggcactctactctgggggctcatggggattgcacgtggagtgtctcacattctgcctgacagcagtgaacacaactctgtacagcagtggtggtggggtagcttgacattctcccttgaaactgagcacatgattgccacaacattcaatagtcatcttcttaccaggaggagttgcagacaaatggggtccttgtcatcttattcagaccattgctccatcttagaaggagtcttgatgtgcttttcctgctggatggatggatggacaaagtgtgtgtgtttataatggaatgaaatatcattcaatgctaaaataaatgcaatttcagttcatgaagacattggggaacatataattatgtatattactaaatgaacacaaccttctgaacaacagatattatttgattctaactatataacattctaggaaaagcaaaactcaaaataaaacaaaacaacctccccccccaaaaaaaaactaggaaagaaatctcagtgatactgaagattatgaagatggaaggctgcaaatggaatgtccagaactacttttatgattctataataattaaaatgttgggatagatttgtccaaaccttagaaatgtacatcatcaaatgaacataaatatgtcttgttgaccatggatgacactgaggtgatcctacagtttcatgaattatatactaaaagtttatgcagagaaacaggacagaaaatgagcctcatgttccctgcttagtgttactggggcttcaaacactcttaggaataaacttgggtaggaaggtacataataggtggatacatagatacagaatggatagacagatggacagttacatatgtaaataacaaacagtctcaagttgtcatttttccataggaagccttagattatttggcaccataatctgttggttcaaagatagcaaccagtagctctcatgttttctaattagtgttcttgggcgtactgaacataattatagcatcctttctgtctccaaagcccattttgtctaagggtcactacgacttaactaatgagatttgggcttttccagttgatgaatcctattttgttttcattgtctttgtgaggtctctctggatctcttctctagtctgtgctgtgtctgtgtgtgctcttgcctctagtagtgttcattttttttttgttagtgctctgacttttagaagagtacataatagttcttttctttattataagctcctatttatttcaacttcaaaaagaccttgtctttatcatcccaatacatttcctagacaactgagatgattaaaagtcagatacataactgatttctctgcaagacagggccattttgtaactgtagacctctagtcctgaaaacccagatgattctgtggatgagaagagcacccctgcggaagcgagcctttgaagcagatgggagccactagttgctagtagatgagagaaaggatgggtgggtggctcaggacagggattaggaacacagggtagtcagggcaccatttcctgtgcgcataggacttttgaaaattcacttgagtcaatcccagttttgtacctgtatagagagtttcttgcctgccagggtgtggtagtatgaatgtaattggcctgcataatctcacagggagtggcactattagaggtgcagctttgttggagtagggatagccttgttggaggaaatgtgtcattgtgggggtgggctttgaggttttctatgcttaggatactgccagtgtctcagttggctttctgttgcctgcaagccaagatgtaaccagcaacatgtctggctgcatgctgtcattctccttgccatgatgataattgactgaacctttgaagtgcaagcaagtcacctcaattaaacatttcccttgtaagagcttctgtgatcatggattctctttacaatgataaaaatccaaactaacacacaggttatttacacagattataattgtgagcactagatacctattagccattattcacattagtgttatgaatcactttgtatgtattgagtttcaatgccagtggggtacccagagtgcaagaagtctgaggatatgtgtgtggatgttgcatggaattttcataggtaattttaatttctacttcaactgacacagaacttagaatctcaggaatgaatgagatgaactaaaatttgaagactgaaaaatttagatgcgctttgggcttcagcagttaggactgataacaagagatcagtgaaaaggcttgagaaaatacattgtttggcaaagtatccagtgaagaggaagcaggaagtcaatgcatgtaacatttaaaaaagagagatgatcagtttgaagaaatcttagtggtgactcacatgggtatctagatttaccctttcagtaaaaccatgctggggaaagtgacaccaaatgacattacagatatctgatgcatttgagagaatcagatctctccatgctacatctgtgaaagttgtctcaggaacttttgggcttcagatgtgaaatgcacatcttttggggacatgacacacatcattgcaggacttccaccagttatgacaacattgactatcttggctttaaaaataaattttaaataaccgctgagccatctctccagcccttcaaaaataaattttaaatatagaaattttctttattaatgcttcttgaaacactcaaataactccgagtgacacagagttgtggacactttaattaaaagctatcattccgtgaatattgtagataggagacctgtagccagaggtaaggcactttatctgaaaatgcaaacctgccaaatggtaatgttatcttctggactgaatttttaaatagaggaacaataagaccccataaatgccctgagttgtgaatgccccctcccacatacatatacatatacatatacacgaatgttcgttgctttgctgagaagtactcctagaaacttgaatgggatttttgtacaacaaacacctgagatttgtgcctgatgaactgaaaatggcagttccctaacaggagtccctaactgcctggctatttgctaatagctcatgggtggaaaatagtttttaccagacacagaagagttaagtgtttgtgtctcacaatgaatgtgggtctcctaggactaaggtggacagtgctgcatacatacagcactggtgattgtcattctgggggctttggtcgggggagggtcattcaattagagctgctcttctgcctcactttcacctggttaggatcaaaggtgatttagctgaaagtgagatgaaaaacataaagctatcctgtcacccctcctgggccactaaccctgtcttcctaagcttgcagtgttttgaaagctactctgtctggcctttgaaattgcattcaaatccttctctgaaagtccttagactgtaaccaatctcgcatggcgagagcagtttgggactgaaaaaggaacacagagctctgatgagtctattgaatatactagagggcaccttaaagtggaacaatacaattggtttcaaaagctacatcccctaccctcaaagtcaccagcaaagggaaattggatgggaatgtgtaaaagctgagttccttgggcatctctccccattcctcatggctaggtactagtaaatttttatcagtgtccttttatttctttcatgctcttagtcaagaactacagcaaatcattaacagctggctcatatacaagccattatgacatttataatcctgcccttttcatgaataccagctttattgctagagaaatgctatttccggagtataccaacttacttgacagattgtgcatttagatttttaatttataattcatcacaatttggtccacttgaaagtatcccaaatccacaaacatgaggttttcttcattgctttgaagactaacaattgaaacacgactaattataagaagcaaatcctctctttctcttgtttgggtgaaaagattatttttagcccattcccggaattatatgagctgtaaattttgactctatctcttccttcctggtatctacttctgtccttaagattggaagttgacaaggtattgtaaatagtcttttgagatttcctattttaggaactgtgaaccaaagagggagagatcactgcctgcctccactgctttaatccttaataggtttaaacctcagtcaggaagaggaggagaaagtgtgactttttaactaacactgtcatctttttaatcatgctgatcctggtaattcaggctccatgaaagtcacagctccaacatccctctgtgtgggggtggggcttatcatcaccagcctgacaggaggagctctggtgggctaattgctgtggcagagctagctgggagtcagctgctgacacacagggactagtgagggaggcaggctatgcctgttacaaaccaaatatcttcatgctcctcaggttccttagaaagataggaagaataaatgcttgctgttcattttttctctacacaataaaaataaaatagcctctggctaaacctggcaacaacagcagagacatttcagggaagaaaaaggaaaattttcaaattaacattattataaacatttctgcctgaaagtgctggaaatcaatttcagtgtattttgcattttaatgaattacaaagagataaatcagctgtgtttgaggaatgcttgcttggcatgctgttttcttatcgaatcttgtcttagctgatcacagttaaaatgaaaccagtgttaattgaaggcgtgggaaatgtaactgctatttaatgaagtaaatgcaggcaagttgtacaaaattagaaatgcgccttaatgtattaactctgacacgattgttcctgtgctctggaacctaatcactcccaacgggattcttaatatattaaaatgaaaaagaaggaaaggaagaagaagaagaagaagaagaagaagaagaagaagaagaagaagaagaagaagaagaagaagaagaagaagaagaagaagaagaagctgaaagatgtgaaagaaggctggggaaaatgttcctcaagatataggacaatgttttaatcatctagtataaatggaataaaaattatgttgtttgaatcctatatagtaaacagcaacttttaactcctgagtgttcaagtctttgggagaatatagaattaattacatattttctattaagaaacaattcattttcttttgcactgataataataatctgcttgaagagggagtgtgtttttgatgttactgaggttgtaggctttcactgtattgctcgttctagtaccattgcatgtgttcattaaatttttgagttctgtgactctgaatgacaaaaatctcattgcattttcctctatgtatgcatgtgtccctaaaaacaaatgcagtgaatcagagcccagtgttcaatgacagcacacaatatagatgtgtttttctcatgtcttctaaaaaaggtaacccctttccaattcaatattgttcttactaactgcatttcattgtcctccaggtaatgaatttttcttttttttccttctttaattgcataaaacaagtaaggcaatttcttgggaaataatttcatgaaaagtaacaagtgacatatcatttgacaaactgaaattaggtaacaacagaagggatgatttatatgttcttctgtaccatagtgttttaaactcagaggctgataaaatgtcctccatttcttatcctcaacaacagaaagatccttatgaaattgcttggccagtataagacttgaacctgatgcaacaattagcgggaaacatgcttgcaaatgaataaaaatgtgtccactgacttttcagaaggtctgacacagcagggtgtgcactaggtaaatttttaccccttgtaaatgaccagaatagtgaaactgctcacctttggagttggtgtcacagtcagaagcatttgggtggtttgctgtcattgaataattgtaactgctcttattatgagggtcttttcaaactcagttatatccgaatacacatcaaaagagaaaatggctttctattttaaagtctttgcagagttacttttcagagaaaaggggtctttgttaacaaagatctctatttaccaaacttgaatcaggtttcagaaccttctgatggtccctataaactcccttacaatgttctgttttagttagaatcctgctatgtcagtttattcagaaccccaccttaaccctgagattccctttctgtattttcccattcacttcttcccactctgctctgttgagaacactttcccctgatatctttgaaatttacttctgttccctattgtgcctctttcctggatcacaaaagtttggaataaaatccattgacattgtctaggcttttcatggccaaaaccacagctttcatctaaaggggaacaagatattattcagttgccattttgaggaagcatggccagggaacacagatttagggtgccccaaattccatgatccaatgtggaagcagtttcatgatgtttttatagttttgtggaacaaaggtagtcataaatcaaggcaagttttaaatatcttggtgggtacatcagagagtcaggtacagccagataggggaatgtaggctcaagatgttatctgatgaatttcttaggtttgggattggtggaagctagtggtctgttaagctaatagattctacaaggttattatttgttagtcatgaaattttagtttccatacaaaggtggacaagaaatggctgtcccagagggctagaattagtccaagataaggtgtttgccctctggacctgcaacatcctaacccctccacagtactgaaatttcaatccgtcagtcactcagacacaatttcttttcaggagtttttattcacagattgctgtctgggtccagtgtttcttcagcaatgtagattgttgagagagacagaagggtctcctgttgcatacttttttggcaatttgcttatggataggagaaacagttcattgtggagctatagaacctgagccatttagaaagcaaatgtccaaaaatgaagctgtgctgctggattgttctcaccttgctcattgttgttgctctgatattgaaaatgtctccacccttctatgtagtagacacacatgatcattcttgagagcttgtgtgaggaaccttagacagtgattttctagaagagatgatatgcagctgtgagcatgtgaagagactatcaatggtttagcagaaaaagcgtcaccatatcattattgtttattgttattacatttctaagcatttgctttctcagttaaatttgaatctggtcttgtgacttatatatatatataatgtgtgtgctcatttgtgcacatgtgccagttctgagtttgtcttaagagttcctctataactatctatgttcttgacctctgacatcactctaagaaccagttctggtttatttctctcatccagtgtagaataatctcacatactcagacctgaatcttcaggtttacagtatgaagtgtagctgtcataatgttccatatgagctaactagtgctataaaccggtcacttattttattgctttttgcacactactaccttagcagctcctgactgatacaagggatttgagcacagcttattttggaatatctaattacaaaatattaggtgtaaattagttatatcatcattgtagtcagctttaatatttaatgttatgctctcaagtgaatatttgaagcttccttgataaatgagtaggatggtatagacttcatatctcatggcagtttttactgtgtgttaataagaagtatgaagcttcccagagaaaaaaaggactttgatgatcagtgattaccaaaatatgttctgcatattttgagctacctatcagaatgctaacattggtttgaacttttcttcttaactctgaaatccagggcctattttgtcaggtcagtggactagctgaaaacttcttggtcctgatggtaagatatcaccactaattctgttttgagcagcatagtacagagtattagaatagttgagagttggggacctgtcttttgctatgactgtgacctgttttccctaggaaaagcctgctaacaatgacttgagattattaacaatgacttgagacttaaacaattctttaagacaacaaatttccataatttttcaattctagattttttcatttatctgtgttgatttacaagaacaagagaaaatgaacatttgacaatactgtcattaataatgtaagtgtatgagattcaaaaaggtatatagatagagttcataggtgatcaggaacctcctaatgtggcagatttatgacaaaacatacacaaaagatgaaaagaactctgaagcaaagggtaaattatattcataaaactaaaattaaaaatgctaaatgagaaaacaggtagatcttcaaggagtttggaagaaatgcatattatcaaaatacatagtatgacattgtcaaagagttaataaaatattattttaaaagatagtgaatcttctaaaatattttaaaagctaaaaatatttaagatgagttttgatgagaaagagagaaatgtttggtgttatctaagatccagacaaaccgagtcccagggtctttctatcttctggctcttgttcctttcctcgtattgaaatgaatcaatcataaaatccaggagatgtgcttataaggactagaaagcatatggctaaacattgttcctattaaatttttgataatgagctttgtaccctcaactttctcatctaatactttatgtctgcctttggtgccttcataggtgtcttccttgactctccttttgatggctagaaaacataatgcatatgttttcagatgatttggttgttaatgtaaagtatatgtgaaggtgtacaggacagacagacccagagtttagaagaacacagtgtggatctaaggctgggtgtataggtttatgatttgtgtaatcacacaagtcacacctatatagagcatcctgaacttggttaaatcatctgctgttgtcatcttgatagtctttatagtttatctttgaattatgctttaaaggtgaaatctaattcaataacagcatgaatactagaagagaaggtaccatatgggtactcaccaccattccttccatacaagcacataacattcatgatgccccacagcatgatatccaatagacacttatgcatggaacctcgataagagttgaaccgaatacaagtagacatgccaggtcttcatctaagtgtgggtgctgacaacccagagaaagccatttggcgttttctgtgtaacagactttttcaggggggatatgcaacccacactctgacagaaatctgtctacttatccccccaaaaggcatctatgactaaccaaatatatgattgcaccatttagttttgtcaactagttagcttttattaggattaccagggagagtatgggttgggggttatttacaatgagcagagatgatacaaaattcgtttcatcatccaaaagcctacctcaacatgggggattactcaccaaacctgcaaacctagaggtccttttagtttgtagactgctcaataatctaaatattttttttctctgcagttttgctctgggcagtctcctttagtagttgtttccttatttttattctgctgggcaggagacatcaagagtattccaagtttctattctcccagaagacctgttgtttaactcccaaggctcatgagtccttcactccttcctggagagaacatttcaatttataggaaactgacacacaacaacattagaacgagtgcttgttttggaagtaggaagtgagaagtggtgatttgtgaaacacaaatgatcaagaacctcactgtatcttttcttccttgtgttacttctcggtgcttgccaacaaattttactgaggatgatggtatgaaaataaagaggaagacggaaaaccatagagccctttccttactcaacagtatacactaaggcatctgaggaattacataaaaacaatactaggtaattactaaataatataagtaatgagaagatgaatacataatagtacataaacattaaaagaccaatacacagaaattataacttcaatcctgataaaaatgatgacatttttgtatctatttgctaaatacttggaaaaggatttgaaaaaaatgtctgaaataatatcaaaatgctttacatagaaaacatttgtgaacacagtggaagacaacctggggccaaatggtcaatcacaacacacaagatgagaaagatgaaaactacatttaggaatcctataaagttaaagcattatgaagagaaaatttgtaaagtccaaggaagtaatgaatagaagaacaccaagtctctcagtagtcattcctttgattatacatatgggtgaaggaccatagagtatcaatgtcaagaaagagttgtatattcaggatttagaataaaatttatatcctcctaagttatcattttcatacagtggagatggtcttgagcacataaaacattagatttagaacgtgaaagatgtcattaaagatggggaagaatgctatgaaacgtcaccttccagatacaacataacacttgcaatcatgaacacatagcagcaatggatatgaacacatagtcagaatggactgctatatatcatcatagatacaagggggtgcttctgaggccccaatctttatgaggagctattgactgttagtggttgcatcaggaggccgcatcattttcttttgaaatggtatgggccttgggggcctagttgggatgaggaagatgttcatgaagaaaaaagcaagaggatgaacataaccacaaaacattgtatgcatacgaaatgtcaaaagaagctttaaaatccgtcattgcaatacagtcagtaaagtgttccataacataaaaatttggaatatgctatgaaacatatagtattatatatttaatacactgtctttaaaacattaaggatcttatcagcagaaatataataattcacaaaatttttttattaggaatatgagagtagtcttttggaaataatgtcatgctaaatgctaaattacttttcttgagagacattagagattggtgtttgatattccatttaaccaccagaagaaaaattataatgtgcaaacttaaatcaatataagaacaatgtttgccatggaaggtgacagaggaaagaaaagaaaaatcaaatgacagtgtgagaaatacaagacaaagaaatgatatttaatgtcagtttcttagaacaagaaagatcaagcatgccaaagaggtggcaggggttagtggtaggcagaaataaacatttgaaaaaatagctgggagtatagcattgtggttagttgcttgcctagagtaagtggggttctcagtttcttcaccatctctgtagtaaataaaacggaaaggaaaagaaaagtcacagcagtaccatctgactgagtaaggaagaactttacattcaacaagcaaaatgtgttttttttttctaagttgggtgattgtttcacacaaagttgtcaggacatatcatttaatcttaaagaagcaatgatacacatggaaaggtcaacctttacagtcatctcatgtgtatcttgttaatgtatgaagtgtattaagaacggaactaggtttgatcagagtgcagagtgagtcagtaacggggtttgcttatataatacattgaaaacaagtgatataagactttctaaaccagaaattctgcaaaaatacaataatacagttttttttgttttgttttgttttgttttgttttgtttttgtgctgtgagctgaaccctggtcttgagtttcaagaatcctaagacaagtcaactcacttcccaagataaatcttagatattttaatcatgtatttcaaagaaagaatctctagtgaaattgttagaaaaatctaaaagaacaaaaaaaggaaccatcaaaatataagatggaaaatgttgaaataatttaaataatttttaaaatataaactacatgttaatatgtttgtttgcaaacaaatgtagtaaattaatcttggaaataacttggaggaggacaaacacagtgcaagtggcctaggtgtcataagtaaaaacagaacacagagctgaaggggcagctagtgaagaaattgaaacaaaaataaatatgtaccctgggagaagaacagagaggcaaaccaacaaacatttaaattcaagtcattttgtggaaggttctataaaaatttcaaggactaattatgcctatgaccttttacaattttataagaaaacagaaaagttaacacaaaatacagcaaactataagaaaaattttcaagtagggttaaaaatcagggaataatgactttattagttttctcaaaagatcatgcacacatgtttaaaaaactactaaataggatgtcagccagccaattctagtcatgtgtttaatgataattcataatttactgcagaaattcaaggatgatctaatatgaaaaaactgatctctatattgatgcagaatacattatcagtctttaatcagttctttaaatagatttgaaaagcattttaggtataatttttaatagaaattttcctatttgataagcatattatgatttaaataaaataaatgacaactgagaattttatattaaaatttatgaagaaaactttgctaaccttaatgagtaagtctgacattgtaatgtgacacccataacctcagcactctaaatgctgaagcaggagaagtccaagtttgagaccaatctgggcttatagtgaagccctgtttcaacaaaacaaaaaaggggggcataaaatgaatatcaattatgatgttatgttttaatagtatattaggagtctatactcacaatgaaagatgacatttttgtttaataatggaaaggaatagataagtttttattgtttgtacattctatgttcagaaatccaacagaataaatgaataagcatggaaacctaactattgtttagctagatttaaggccatatcaccaacttgagtatgagaatactatcatatatacaaagtatgtgcatgtacagacattcttgtagtttagaatttagcctagataaaaataccatgtaagcagagaaaaaaattatgtggaagaatagcaaagaaaaaatgtttccaaggaaatatgcattgttcatgaacagcacaatgtaacacttagctatatcattcataattagctattctatgaatttgttcatggagtaaaaatgctggagctatttttaagtaattacaattcataagtaggtttccaaaaaagaggtttataacttgattagtaaaagagaaaagaactgaagttgccttgtataataataagaataattgaatagcacctctgcctccaatggaggtaccacttgtcagaataaacaacagtctgtccagcagcaatgtaagccatatgtgtggctttaatatttcatgtgtcttttacaaaggagatgatgtaaattgcaataatatatatatcactaaaatgtaaccaaaatactaacatttcatcctgtagtgatgtcacattttaattagctatttcacaattcaactaattgagtttgaaacacagtaggcaatttggacttatatcccaaggattgattagccatagaaactagtgatggctgcagcagacatggtgagataaggtattattttagttatgtgtatatgtgtgtgattatgtgtagtttcacatcattgcagagatctgaagagggcatctggagttggagttgctcactaagaactgaactccaggcctctgcaggagcagtattacaagcttacccactgaccatgtctcaagcatcatgtctccctgattcaattatttatattttccctcatattaatctctgtaattttgttaacacaaacacatatttgttagttatttgaaaatctcatgtaacatgtttctatgaacactgttcttttattgattgttgtctttaatttattattattattgagtctgtcaactgttaagataaatctttctgccaaaagccaccgagccccaccgccacatgtgagctttgtgccagccacccgcctgagataggcccaaataaatacacaaaacttgtattaggtttaaagctgcttggccaatgactaggattcctaatctgttagctcagtcttaattatcataaatctatatattttataagacttatcggacaccttattggtgtccctctttgctggtggattacatggtgctgctggaggagcaagaggaaaatgggacgcttgctgtttctccttctttaaatatgagtctccttgctatgtcacttcctgcctggatcaccacttctctactacatttcccagaatactctttgactcctagtcctgtctaatctgctttctcattggccaaacagtattttatttaacaatcaataagataaacatacacagaagtactccccccatcatccaacaatatcctagacataattatttgaaacttttcagaaaagaaatcttgttaaaccagataaaactttaaaaataaacaaaatatatatttaagagtgatttggaggaacttaatgaaaatgaggtgagttgatagtgtggctctgttaagagcagacagctgagtcaataggctgaagctagggttgcaaaccttttcttattgggctcgatggtaaatatttagcttctatgggccaagagaaaaagtagaagctattatgtatatgattaaataaccatctaaaatgtcattacttaaacatgtgaaaattaaaaattagctggttcagtaaatatggctcagaagttgtaattgattgacatttacctgaaggcttgtattaatagtcaaaaaccacatgggaggtaggagataagacatgatgtatctcggaagaaaagttagaacaaagaccttgtatatatcttcctgtttaatgaaatagtagagaagaagtaaagaaaacactaccattgaggaagtaaatgaaattcttctagcttctgctctgaagggggaggggaggaaatactgaggtcatagtactttcctatctgctttcactgaattggaaatttattctcagttaaaaaaaatagccagggcttaccatgaaaggatttaagtttactcattaatatgtgcacaagtactatgcacttgcgtttaattgacctttgtctatgtatccaaccagagaggatttaccaaagtgcctcctgcttggttgtcctgtgaatatcaaggcgggttccttctgagtacttttgctcttactgtacaagaatatcagagagttgtagttataccagaaaaagggttattttagctcatggttttgaaggctaggaagtcttaagtttaatagctatttctgatgagagatgaatgtcacatcataatattgcatcaaaaaattccccatagagggatactctctcattctagacacaaggggagcgcctaggccctgccccaaatgatgtgacagacctttatgatcccccatggaaggcctctccctccctagggagcaggaggaggatggggtggggggggttgtgggggaatgggaagatgggagggagagggaactggtattgatatgtaaaataagattgtttctaatttaaataagaaatgcataagcaagcagaaaacatgggaaaacacacaggtagccctgttttatgaccacccttttttgtggcaactaattcagtacttgtaagagtaagaactcatccataaagaatactgacttttgagttaaggatcttcatcaacaacccaaacaactccaatttggacctgctccccaaaactgctgcactggaaactatgtcttaatatgtgctttcaggtgacaagccgtgtttgcccacagtaactgatgcaatgaagacatgaacgataatgagaatgtcatcaaaaacaccagagttttcaaagtcattcaatcaagtgtggaatatatctacataaatatgtatatttaaatattttagttgactcataaaatcatacatgtatgagatcctgtggttacataaccctctggatttaatcattcacagtgctgccaggagagccaggcccttctaaatctgtcctagtatcaatctgtgaaatgcatcttgaagagtggacaggaagcatcccaaactaagtcatgaatatgattaactagcagatgtttcattttactaaactttgattttaaggagtaaataaggttaaactttggttctcttcagactatcattgcaaaagagtttattttaaactgtgttattcccatcctatggcccaattggttaagtcagggattgtcaaatgtgatatctggactcccttcccatgaagttgtaactgcaaaggtgcacacaaacctgtagaggatgtgagttctcagtgctcagtgtattacaaagctgttggtaatgaaaaagaatatagccatttttcaggaggaagtgaaagtgagaaaaagttgagattgaaagacagtaacaaaagagctttagaaggaaaaaaaatagaatgaatgaaaacagggagcaagtgaggtatgagaatgtggcaaggagaaaacaattgtacagaccctgagaaagaacaaaacacagatgtttcatgcattctccctgtgaccctggtagccacctgctctagtacccaaatatctcaatcccttcattttcagcatcttcctagattctcttaaaatcttctcatgtaaaccagtgtagttgtatttttcatacttgtatctagtaggttgtaatttgtgcatgcacatatcccatttacccataatgcattgaaatgttaaaatagatacagacttttgatcagggtaacataatgatatttcctaatgcatcattttatcatgttatctctgatggaggaaaaagtaagaaaattatccagagtaaataggcattcataaatagaaataagaattgagaggaaaataggtaaatggaaaagcaaagctcccaaagagaaagatgtaggtccaatgaggagagtaaaaatactgatatggaagtttaaaataaaaagcagaagtgatgtttttgagagtgtttaaatactactatctgttttctaaatctgtttatcacagtgtttccatcctccaagcttctaacctatttctgttgttggaatagttttaaaagtcagacaatagtaatcaacagtatttttttttaaataaaagaccttgactggccataaagagtgattgagttttaattttctgagtgaatgggtagcatttccatttttattttccagcattagaacaaagaggtgcccatgatcattggttcaggatatactggttggcctggcagaaacaaatgggattcaatgatttggctctctcaaatcatagtgaataacacaggaaaacacccttaaatctaatgttcttttaaatatatcagtgtaggcacttccctggaaaactcaaagaaaacaaattcaactcagattaaagatgaaatctaaggacattcagctgcattttgtttcctcctacaaagatcagtgggaagtaaatagagaatgcctaattctggtctaacacttctccgctattgtttatattcttgattcatttaacaagaggaaaagttatgtcacttgtctcactgctcctctctgttgcagcaacagacacatcttctagtgcactgccagtcctgtatttgagacacagtggtggaggtaggagtgaacagaattggatgtattggatgtctaatcaccagggctgcctaaatgtagtccccaataactgagtatctaacttcatggtttccatgccaaattcacataaaaaggggtgtgacctgggaagtcccaccactctcctgaataccattactaaagttcactgtacctttcctcctcccctaatgttaggttactggtcaaaaatagtggggaaaaaataaacctgagatcaaatgtgctgctcttgagaacttgtggactgtctaaacttctatagttattttactctggcctttaaagcctctatcttaaccttgttctcacatagacaatgacttggtaagccactagctccactaatcactgtttactcactgagtggagaaatccagctctttgattgttgtttcaaacaactgtgttatctataaagtttctaattattgggcgccaatgtttgtgtctgaaatggaagaagaaagtaaaaccagtggtgccaagacattgcagtagagaagtttccagtgccaagatgctaaaaaacaactttcagaaaggagagcctagcagaacttgttttcttgtcacattctgttgaggacgtaaaaaaaaaaaaaataagcatgcatactcctgggttttccacatcccagactctcctgtatttgttttattatctgccctagaaaatagtattttaagtcaccattctctactgatattatttatagtcacttcctgggcttctctgggaggggtgtagatcccgagaggttggctatccctggcttggtggagtatgtagtgaggatggaaacttttgaaacataataaggctataatgaaaaggctagaaaatggacctaaagagtatagccaggggttgttaaagggagatcgaggaggggatgatgtgaagggaagaacatgcaccaagttgtgcagaggccccaatcccactttcttgatatcttttcctgaaagagtatcactgactaacactactgaagtaggactttctgggttttcttgttgtcatttgtattttgttaatggacccttggaaaaataacttttgtgtggtctttgagtaatgctgcaagtgaaaagttcagaccagacactgaccgtaacactgtgtacacatttccccatgacctgctttgtcttgctttttttgggaatttcatatatgagcaccatttttacatatatgaacatatatttacattatttccatcctatgttctttcctttcaacttcttctgtgttcccccaactttcgacttcatgatctcttatttaattattattattacatgaacacatgtacaacacatttagcattatatatgtatatgtatgcataatatatagtatattatagcatatatagtataatataatatatatgtttagtacatatacatacattcataaacacacacacatacatatatatactgaccacttgggattggatagcctatcaaggtaccaatttctggagaagaatgattctgtgcaacttttagttgcctctagctcttcatctagggcaagggctactacaacatgacctaaaaccacaataaatcagaatgcagagttgtgactcccagtcccagtggataatctacaaaatactcctgtacctatggctcagggaacattgcagaagagtgagtagaaatattgtaaagagtcagagcatgagggaatttgcagtgagattgtgtcccctagcaatgtcagaacccacacccactcaccacatgacttcccaaacttgagctgaacaaggatggtaccactagacatgccaaagtagatgtgagaaagaccacaaggcttcagccctacccaacaaactacacgtaaataaggaatactgagcataggggatataatcttccccagagaatagtacacaaattggttatccaggaacaaatggtcagctgaaagcacagatagagttaaatttatatagactgagaagactatatttaggaatatatgtgtatatacttatatgtatataacaacaattaaagtaaaaagataccatatagtttaagatgagcaaagagggataaatgggaggggttggagcgaagaaagggaggggataaatgatataattacattataattacaaaataaataaaaaacaaatagagtaaaaggttataaaattagatttcaaaagtaaaacaatccagggtagagactctctgatgtgccagagaccacattggctgccagaggtccaggtagacaatctacctgcagactctttgctctaccagagaccacctgccctcctgatgacctccaccagtctctcactctcttggtgcctggccaccttatccccattcctgtttgatcctcttctccatataccagtatccaacttgggcagggacttcctgtcctaccacagactaagccagtcaccagaaatccaagtaggcacatgtcctcagaccttctccctctctatcaaagcccccctccacagcctattccccatctccaccctttcattgtcactgtgtcccagccactaacaagtctctagcagagaacccctgctgaactccccactccatctgtgaatgcccactctatccccagtcttaagtcctcctctttgccctataccagtgccctactagggcagagactccttgctctaatagagacaatgctgtcaaaggacactatcaataggaaaaaataccagcctacctaatgggaaagggtttttaacaactctatacctcatatagagatagtaaccaaaatatatgaataactcaagaaactagacatcaaaaacaaaacactacaagttaagaaatgggatacagatgtaaacagaaagttttcaatatagaaaactcacatgtctgagaaaaatttaaagaaatgttcaacattcttagtcatcagaaaaatgtaaaatcaaaactactttgaaatttcatcttaaacttgtcagaatggctaagattaataacacaagtgacagctcatactggtaaagatatggagcaaagggaacactcctccattgctggtgtaagtgcaaaattgtgcagccactatgaacatcagtatagtggttcttcagaaaactgggaattgatctacatcaagacccaactatatctctcttgggcgtatacccaaaggatattccatcctaccacaaagactatgttcatagcagttttattcatagtagccagaaactggtgaaaacctagatgtctctcaagtgaagaatggataaacaaagtatggtacatttatacaatggagtattactcatatattaaaaaaattacatcatgaaattttcaagcacaaggatggaactagaaaaaaaatcgtcctgaattaggtaacccagaaccagaaaaacaaaccttctatattctcccttattgtttgatattaaatgttaagtaaatcatgatgattctataatccacagacccagaaaagctaagtaacaaggacagatctaatggtgtcacatagatctccctgggaagcagaaatagagtagcttttgctagtggactttgggtggatgggaataggaacaagaggtaccaagatgggggagagatagaggggacagtatgaggagagatcagcagaattagatgatatttcatggagcaatgtggaaaccgagtgcagtagaaacttccagtattctacgagggtgattctaacaaggactgctggtaatagaagatgcagaacctggaccagccatcttctataatcaggcaacatcaagtggtgggactggcacaccaacccagccacaaagtcctagacctaacatctattccacctgcaagatgtgctggagcaatggagttacaaaacttgtgggagtggtcaaccaataactgatctaatttgaggcccatgccaagaaagggagcccatggacactaggagaacatggcctacaggtatcaactaagtaggatcataggggttcacagagactaaaacattagtcataaaatctgcatgggtctgtgctaggccctttacatatatattatggatgttagtttggagtttttgtggaactcctaacagtgggagtatatcagacgcttttaaatgttcttgaggctcttttcctcctactgggttgacttgtccagccttgatatgagtgtttgtgcgtagtcttattatatcttgttatgcctactcttttctgaaagcaaatggaggaggagtggatctggggaagacagaggtaattagggggaactggaaggagtgaacagaggcaaaactgaaactgtggttagggatcaggtttgggttagtgatatagttaagatcagagccaataataggtttcaggaaacattatggttatgttttgagctgtgtttctgattaggattacaaataaggttatttgcatttagttttaggattaggataatgtttagggttaaggtttgaaaaaggtttatagcaaacattgtggttaaggttgaggttaaaactacagtttgggtagtttcatttctagaattgggatgaaggttatgattaggtttggggttaattgagagcttgttttaaggtttaaggctaagcttaaggctaggagtaggttttgatttgtcctcaggatatagtgttaggcctggagtgagcagtcaagttaggtccagggttagagcgtctgtttgattctggactaatgttaggtttaaggctaggtttaaggttaggggtatgtttaaagaagactaagttggtggagggatggagagggagagcaatgaaaaagatatctagggagctgtttgggggccagggagaaaactaatgctagagaaattcttaggaatctacaagaatgatcccagctaaaactcctagcagaaatggagagggtgtctgaaggggccttcccctttaatcagattagtgactaccctaattgttatcatagaatctacatctagtaactgatagaagcagatgcggtgacccacagccaagcactaggctgagctactggagttcagttgaagagagggagcagggagagtcaagatcatgacgggaaaaatcacggagtcagatgaccagagctaatgagagttcatggactatagactgacagctgaggaacctgcatgagaccaaactagaccaactgaatatgggtgacagttatatgacttgatctgttggggagggggactggcagtggcaccaggaccaatctaaggggcatgaactgattttttggatcccattccttgtggtagaatgccttgatcagccttgatacttgatatgggggggtggtcctgcctcaacttggtatgccagacttcattgactctccaaggaaggccttaccccctatgaggagtggatgggggagtaggcaggggaaggcaggggacaggagatggggaggaagagggaactggggctggtatgtaaatgaaaaataaattttttaaataaaagaatagaaaaatctactgaaaaattagtttatgcttaaggctaggattaaaattaggaacagaggcagcatttggattaggtgtagaactttgtttagtattatggataaggttaagatagagtttgttataaagttatagtaagagctacagttagtattaaaattatcaataaagttggtagtaattatctagttttatggttttgaatagatttaaggctataatcttatgtagagccaggaatatgtttagggctagtgtttgaggtgcagttatattagggtgagaggtagggtttgggctaccatcaagttatgtttatggctagagttggtattaggtttagggttagagactgtgttgggtctagtattatgagtatggttcattttagtgttaagacgatagtagagccaatgtttgggttgggtgtacaactttgctttgttttagggttaaatttatagacagggttagcgataagtttagttataataatggttagttctaaagttagggttatggctacttctaggaatcgggttagtttatggaaagggttagggttagttttagacttaaggcatggttaaaaccaggcataagattagggttagagccaggcgttggtggcgcacgcctttaattccagcacttgggaggcagcagcaggtggatctctgtgagttccaagccagcctcgtctccagagagagtgccaggataggccccaaagctacacagagaaaccctgtcttgaaaaaccaaaaaaaaatagggtgatatatgtgaaggttaaatttagagctagaattatgttatagtcagagctagggtgaggtgtagcattctgtgagaaatatggctcaatgtagtacctgggtaaacattacacttagtgttggatatttgtttatggttagttttatagatcatttgaaggtttgtggtaaatatatggttgtggtttgcattttggctacagtctgaggagggttattataaaaatagtgtagggttagggtgatagttatagttaatgttagggataaagagaattttaggtttatttctaagattaatgttataattaaagattgacttattttcaggattaatttctgggtcattgttcatgctagaagcagttttaattatatttccaatattaattgtattagttagaggtagactcatgcttatggttagtgtgagggataggtacagtactgatcgtatttctaaggttagtgcttgagttagagtttgacttagtgttgaggtcaggactaagttgttgttagggttattgttagtcctctggttagcattagggttaggtttatgtttgtgatagggttgctggcagagtgagagttatgattatgaatagagttccgttaaaactcttataaaactaatatcagaactcccaagtttttttctagaaatatggcttggttttagattttgttttatgtttgggctatagcagaattaatcttttgtcagggagctagcaatacatttaggatttttgtgagaactggggttaagcttagagtgagaggcagtgtttgtttttgtattcgttttgggtctagtgttagagctaaagtttggtttagggataggaacagggctatttctaaggttaaaggcaggctttaggctacagttgaattagatctatgtttttggctaagagtcctgttagaacctgtttgaaattaggcatagtactttctttctaaagtggtcaggttaatggtatgcctagagtcaacagggttaggtttagggtaatggctagaatcagtgttaggtataggataaatttttggtatagttctaagattaatgtcacattttagcgatataattaggactaggggtagggaaatgtttttaagagtttttagtatagtcctggaatcatgattggatctttaaatttaaagttaagattggtagcataaccagtgttatcattatggataaacttagtttagagcttggtgtgaaattactgtaaaagctatccttagtgtcagaagtatggaaaagtttagttgtagagatacttttggggatcatcctgacgtagtgttatactttcttttatgtccagggatgtatttttggctggtatttgagctaagactgagtttaggatgacatctaacatttagggtgttatttttttttaatttatttattagttctagttagggaacaagcttgtttcacatgtaagtcccttctccctctccctcccctcacccccatccctcctcccccaccccaacctactccccaccacatccacccaccactccccaggcaggctagggccctcaatgggggctctgcaaagtccaccaaatcctcccatgctgggcctgggcccttccccatgtgttcagagccagagtgtatcccttcatgtgggatgggctctcaaagtcccctcttacaccagggaaaaattctaatccactaccagaggctccctggagtgtagaggcctccttattgacattcatgttcagggatctggatcagtcttgtactggcttccccgacagcatctgggttcaatgtgctctcccttgttcaggctaactgttcctgtgggtttatccaacctggtacagaacctttcgctcttcattcctccctctcttcaactaaattcccgatttcagctcagtctatatctgtggatgtctgtctctgcttccatcagacactggatgagggttctaggatagcataaagagaagtcatcaatctcattttaggggaagggcttttaggttatcctctccaccatggcctggattgtcagatcctgtcatccttgtaggtctctggagatctccctggttccagatctcttcttggacctatagtggctccctctgatatggtatctctcatcctgctctctttcctctctctttcccccaggtgttattcttgttaggtctacattcaaagatatcatgggtttagggctagcactggtgttaaggctaaggttgaagttaggtttaggactagtgttagaattatagattagtttagtttacagatggacttagttttaggttgaagagcacggttcaaggcagtgtttagattaggcatcaaactttgttcaatgttaaggtaatggataggtgtaagataagtttacattggggatatgattatcactatggttagagttagggttaatgctaaggaaaaagtagttttaacactaggattttatttttagaaagttttcctagggttaagttagagctaagattaagataaaaaatttagaaatagagttatatcaggttgaactttatggtctgggttttagttaggatcagagtcattgtttggtttatgactcagtctagggatagagctttgtgtagcaattgggtaagagttatatttagtttgacaaattggtttatgatcagtgttagacctagtttcagtgtttagtctagatatagggttgacgtaaggctttgtccttggtctgattagggctattgtagtttcaatgttaaggttgttggcgttagggtaggtttatgtcatgggttagggttagggttagggttagggttagggttagggttagggttagggttagggttagggttaggattagggttagggttacggttagggttagggttagggtaggcttacaccatgacttagtgttatggctagaggcattttaggttatcttaaagattattgtgagagttaggcttagggtttggtttatgtttatgccaaggttgatgttaagcctgtgggtaatttcaggtatatttctaaggttaatattagagttagaggtagggttattgctagtgttcaggttggaaaccatatttttagtgttagagtagaggtaggctcatggaaaatttcagatcttggtttgtgattcggtttagtgttaatcctggggttaggctagagccagattcatgtttagggttaagatttaggcagagccagggaaaggactcttgataaagacaggttagaatttgaagtaagttttgtgtaacagctccatttagtggtagcacaatgtttaaggttagttttagaccttttttatgtttcagcctggagatacattaacaagtatttttagtggccacaatgtatttagggcatttgagctagcatgaaatttagggtgagaactaggtaggtatggtaaacatgtacatttggggggtgtgtgtgtgtgtgtgtgtgtgtgtgtgtgtgtgtgtgtgtgtgtgtttgggaatgtttaagattaggaataataatggggacagggttaaaggtagggttaggtttagggtcagaattaagactaaatttagtgttacatttagggttaagactagacttagagccagtgtttggattaggtttagagctttttttattgttaggcttaaggttatgaatgtggataaggtgagatttggttgtgcttatagatatggttagtattagctttaggattaaagttactaccaagattagcaccagtcttactgccaggaatgtagctatggttatctttagacttagagtaaggttagagctaggtttaggattagggttaaatccaactgcgtttataaccttttgatagttaaagtttattaggtatggcaatgctaaagctagtgttggacttagaactcagtttagacataacactgggtgttatggataaatggtaccattgttgctagcatttggtatatatagttgaagacctagttttctggttgggctagatataagctttatgctagtattatggtttgggttttcactatggactaattgtggttatgggtagggtagacagggtttgtcttagggtcagtgttagtgttaaggttcatgttagggttagggttagcttactattagtgttctaacaaaggatagaaaaaagtataagtttatttatttattaatgtcacaactaggcctaaggttagagttacagctaggccttgctgttttatatatacatctaatgttaggcttagcaataggtacaggattagagttggggttaggtacaatatttggtattatttccaagtttagttttagagttagaggcaggtttagggttaagtttagggctgcatttgttgttaagattagagttagtcttggggttatggctaaggctaggtttaggtttatggttaaatttggtgtcagagcctatgtttggaatatggatagcctgctttagagtttggtgcaaagatagagcaacagcgccacttagtgttagaactaatgttagcacttgcctttctatttttaaaatttaatatatttaaaatggatcatttgactttcttttttatagaaaatatttatacaatatattttatcttgatttactcttttacatattcttctcacttcttccaaacaattccacagacttgtttctctctttggaaagcaaactatttttttaaagttgctgtgtttttttttttttaatttatttttattagttctagttagggaacaggcttgtttcacatgtaagtcccttctccctctccctcccctcacccccatccctcccccaccccaacctactccccaccacatccacccaccactccccaggcaggctagggccctcaatgggggctctgcaaagtccaccaaatcttcccatgctgggcctgggcccttccccatgtgtccagggccagagtgcatcccttcatgtgggatgggctctcaaagtcccctcttacaccagggaaaaatactaatccactaccagaagctccctggagtgtagaggcctccttattgacattcatgttcaggagtctggatcagtcttgtactggcctcccagacagcatcttgggtcgatgtgctctcccttgttcaggccaactgttcctgtgggtttctccaaactggtacagaacctttcgctcttcattcctccctctcttcaactaaattcccgatttcagctcagtttatatctgtggatgtctgtctctgcttccatcagacactggatgagggctctagaatggcataaagagtagtcatcaatctcattttagggggagggcttttaggttatcctctccaccatggcctggattgtctgatcttgtcatccttgtagatctctggagatctccctagttccagatctcttctcggacctatagtggctccctctgatatggtatctctcatccttctctctctcctctcttcttcccccaactcaatatttctgttcctccatttcttctcccctactcctcttctccggctcttattgtggcagctctctctcccctatcctcatgctcccaactaggtcaggagttcatgccatttcctattccttgggtccatttatcccttagagaccttcatgttttctagtttctttggtgaagaggattataggctggtattcctttgctctttgtctaaaattcatatataagtgagtacataccatgtttgtctttttgttactcgattacctcactcagcatggtttcttctagttccatccaattgcctgcgaatttcaagatcccattgcttttttctgctgagtagtactccattgtataaatgtaccatattttctccatctattcttcagttgaggggcatctaggttgcttccagcatctgtctattacaaacaatgctgctatgaacatggttgaacatatgtccttgttgtatgaacatgaactatttgggtatataccaaagagagaaatggctggatcttgaggtagattgattcccatttttctgagcaaccgccatactgatttccagagtggtcttacaagttcacactcccaccagcaatggaggagtgttccatttttctccacatcctctccagcatagattgtcattggtatttttgattttagccattctgacaggtgtaggtggtatctcagagttgttttgagttgcatttctctgatggccaaggattttgagcactttcttaagtgtctttcagccatttcagattcctctgttgagaattctctatttagttctgcaccccactttttaatttcattgtttggtgttttggtggctagcttcttgagctccttatgtattttggaaatcagtcttctgtcagatgtgggatcggtgaagatcttttcccattctgtgggtggtcgttttgtcttcctgactgtgtcctttgccttacagaagcttctcagtttcaggaggtcccatttattaattgaagacctcaatgtctgtgctactggcgtaatgatcaggaagcggtctcctgtaccaatttgttcaagggtaattcccactttctcttctggaagattcagtgttgctggatttatggtgagatctttgatccatttgcacttaagttttgtgcatggtgacaggtatggatctatctgcaatcttctgaatgtccaaatccaattgtgccagcaacatttgttgaagatgctatctttttttccattgtatagatttagaacctttgtcaaaaataaggtgttcataggtgcatgggttaacatcagggttttcaattagattcctttggtctatctgcctatttttgtgccaataccaagctgttttcagaactatggctctacagtagtgcttgaagtcagggatggtgatgcctccagaagatccttcattgtaaagagatgttttggctatcctgggttttttatttttccatataaagttgagtgttgttctttgaatgtctgtgaaaaattgtgttgtgatttttatggggattgcgttgaatctgtaaattgattttggaaggattgccatttttactatattgattctaccgatccaaaaggatgggagatctttccattttctggtatcttttttaatttctttctttaaagtctcaaagttttattgtacaggtctttcacttttttggttagtgttaccccaagatattttatgttgcttgtggatattgtgaaaggtgatgtttccctgatttctttctgattggatttatcacctgtatatagtagggctactgattttttgagttaatcttgtatcctatcactttgctgaaggtgtttatcagctgtaggagttccctggtagagtttttcgggtcactaatgtagactatcatgtcatctgcaaatagtgaaaatttgacttcttcctttccaatttgtatccttttgttgtcttattgctctaactagaacttcaagtacaatattgaagagatatggagagagtggatagccttgtcttgttcctgattttagaggaaacgctttgagtttctctccatttagtttgattttggctattgatttggtgtatattgcatttatcatgtttagatattttcctgttattcctgtttgctgcaagatctttatcatgaagggatgttggattatgccaagggctttttcagagtctagtgagatgatcatgtggtttttctttttcagtttgtttatatggtggattacattgatggatttttgtatgttgaaccatccttgcatccctgggatgaagtctacttgatcatggtggatgatttttctgatatgttcttggatttggtttgcttatattttattgagtattttggcatcaatattcatgagggatatcagtctgtagttctctttcttagtcatatctttgtgtggcttggctatcaaagtgattgtagcctcgtagagtttggcaatatcccatctgcttcttttgtgcggaacagtttgaggagtgatggaattagctcttgtttgaatttctggtaaaattgtgcagtgaagccatctggccctgggttttttttttttttttttttttttttttttttgggaggcttttgatgactgcttctatttcattaggggttataggtcgatttaaactgcttatctgatcttggtttaattttggtaagtgatatttatccagaaaaatgtccatttcctttagatttttgaattttgtggagtacaggttttcaaagtatgacctgaagattctctggatttcctcagtgtccgttgttatatcccccttttcatttctgattttgttaattagcatgctctctctctgtcttttggttagtttggctagaggtttgtctatcttgttgatcttctcaaagaaccaactcgttgtttcattgattctttgtactgttttcctagtttctattttattgatttcgggcctcaggttgattatttcctggcatctactcttccatggtgagtttgcttctttttgctctaaagctttcagttgttttgtcaattctctaatgtgacttttctccagtttcttcatgtgggcacttagtgctatgaacttcctcttagcactgctttcaggatgtcccataagtttgggtatgttgtgtctacattctcattaaattctaggaagtctttatttcaactcttttgtaattgtggaggtttgctttgctgccaactatgtggtcaattttagagaaggttccatgtggtgctgagaaggtatattcttttgtgtttggatggaatattctatagatatctgttaaacccagttgggtcataacttctgtcaaatccattgtttctttgttaagtttctttctggtggtcctgtctagtggtgtaaggggggtgttgaagtctcctactataagtgtgtgtggttttatgtttggtttgagatttagtaatgtttcttttataaatgtgggtaccttcgtatttggggcatagatgttcaggattgagacttcatcttgatggacttttcctgtgatgagtatgaaatgcccttcttcatctcttttgattgattttagtttgaagtctaatttgttagaaattaggattgtcacaccagcttgtttcttaggcccatttgattggaaaatcttttcccatccttttactctgaggtaacgcctgtctttgaagttgaggtgtgtttcttgtaaacagcagaaggatggattctgtcttcgcatccattctattagcatatatctttttataggtaagttaagaccattgacatttagggatattaatgtccattgtttgttggttcctgtttgttttggatttattggtggtggtatcattgtgtgtggatttccccctcctgtttctttgtgtgtttggtaaaattagattatctattgcctgtatttttgtgagtgtagttatgttcattgggttggagttttccatccagaaccttctgtagtgctggatttgtgaatatgtattgtttaaatctgtttttgtcatggaatatcttgttttctccatctatagtgattgacagttttgctgagtacagtagtctgggttgacatccatgctccttagtgcttgtagggtatctatccaggactttctggctttcagagtttccattgagaagtcgggtgtgattctgattggtttgcctttatatgttacttggtctttttcctttgctgctcttaatattttctcttttttctgtagatttggtgttttgatttttatgtgtcggggatggggggacttctttttgtggtccagtctgtttggtgtcctgtaagcttcttatactttcataggcatatccctctgtaggttggggaagttttcttctatgattttgttgtatatgttttctgtacctttgagcagtgtttcttcaccttcttctatacctattattcttaggtttggtcttttcatagtgtcccatatttcctggatattttgtgttagggatttgttggatttgaggttttctttgattgatgaatgtatatcctctagcgagtcttcaatagctgagattctttctttctctgaattctattggttatactcacatctttagtttctgatcgtttatacagcctttccgtttccagcatcgcctcattctgtgttttctttagtgtgtctatttcagctttcatgctttgaactgtttcgagagcttccttcacttgtttggttgttttttctgggggttctttagattctttaagagatttgtttatttcttgaattttttggtttgtcttttcctccatttcgtgtaattttttgcttgctttttcttctatttcttgtttcttctttataggtctctatcatcttgccgagataacttttgcagtccatctcttcttcatgctcgctgttgggcttttccgatcttgctggagtggagtccctagattctggtggtgtcatattggtctttctgttgttgagtgagttcttattctgtcttcttcccatatcttcttccagtgggtggaggtggggtctctctacctcctcttttgacccagtggtatgtgtgggccagggattcaatgtcaatggctctggatggtcttgcctctgcaggtagtcccttcactctgaagtagttaggcctccgtaggggtcaggtcagggggatgggaaggaagagtgaggtgtttccagagtcagggagttcctctctgcctgggcatgtctaccccaagcagccgcaggcccggggagttcgtgtgaattggcctttggatgggagttgggtaagagcagaggctcactcatctagttgtggatcggttggcagaaagggaaggaagagtggggtgtttccagattcatggagctcctccctgcctgggcgtacctacccagggtacgcccagggtatgaatgatgctttggaagggagttggggaagagcagaggatcactcacctcgttgtggatcggtcagtggaaagggaaggaagaggggtttgtttgtttttatacctgtttgttacaattagtttttggcttagttttagtgtttatcctttacataggtttacaatgtctcttagagctagtggtatatttagagctagtatttaaactaggcctaggcttaacgtgatatgtaggctttaggttagtattaaagttatttctcagtttagagtttgtgttaggcttgggtttagagttggaactagggctagacttatggtaagatgaaatctagggttaggattatggctttatttataattaagactggggtaaagacaatgtttgggttaagttagagtttggtgtgaagcttagttttatggataaggctagggctagattttttttaaattcttttattatttcaaattaggaacaagcttgtttcacatgtcaatcccttctccctctccctcccctccccgcaacatcccacctgcctgtagccatccccccttcactccccagacagggtaaggtcctcaaaaggggctccccaaagtctaccacatcatcctgggccaggcctaggcccttctagggctagttatgttttgcttattttttttgtcagggctaggacgatcattattactgggttagggttatgtataagatggtagttacagttacttgagttaaatatttaattagggttaggaatatgtttagatctaaatttacataaataaatctatgtgaagattaaatttaggatttaggatcaaagctattattctgcttatggttccgtttacagatggagtttggtttagcatttcagtaatggttacagttagtgttacaaaattgtttgtttaattttagacatatttctagtatgggctatatatggttttatggttagggtttggcatgggtcttataaggatttattttgggttatatttaggatcatggtggggaggtattaaggatagacaagattaacattcaagttaattttacaatttggattagggttatgacttgggtctcattatggttattataggtttagtgttatggttggtggtagggtgatggttatgcctggattagtgtcagggttaatatttttccaaatgtaatgtttgagttagaggtagggttaagattagggctagggaaaagatttatattatatcaaagcttagatatagagttataagtaaacttaaggttaaagtttggtataggtttataggtaggagtagtgttagacatgagagattagttttaaaggtagttttataattagggttagaattggcagtggaccagattagaattagaggtataatgttattgtaagagccacaattagttttagaagtagggttaagtaatgtgggaaattaccaataaggagccagataaaaatacaaggggatttaatagggaaaagccttacttacagagcaacctagccagtaggtggggcagtagcaagtacagcaacctgaagatgaaattgaaagcaagctgtcacgtgagcatccctcactcttaaactttccctacatcaccctgactatgcccttgcaggtgtggtcagacacacctatagcaagcccctaaacaggcatggctacaacatcccttataattccccttttagtctaaaagaggattaaaacttaacagtgtaaagtatccaaaattaacaatcatataggtgaaatataagaagatacaacaatctgcttatatcacatcctaactattttaactaaattctaaagccatctgaaagaggtgtccaagcctgaacacctccttccaatcccaaccataaacagtaggaagctatccctaactgggtatatacactatcctaagtgacaacaatgggagaaaggggggcgtagcatcctccaagttacttgcttctgaaatgccactgcaatagccttgtggggacctgtaggaagaaaatgttagtatagtgaaagtcctgaatgtattttatccagtccatgttagatgggattcgcttgattgaagatctgacttgaaatcctcaacttgattgaagacagtacccgaagctctggctggagtgtcagttgaaatggagcaagttggatccagtgctgttgaggaggtgtggcccattttctttctggggcatccagggattgctgtcaggtgggtcttcattggctatgtgaaactcaaacataagtgttagcggagaaatgtttgcttgtgtaagtatgtatactagaaaaggcaaccatgggagcataacaattatgagagggtgtacaccttgaaagaaagagtcaagaaaagacaaagacagtccccaaattcttctcttattctgtattacatcaattggcttcttgatacaatatagaaactaaagtttagttaaacaatgtgcttggagtttagaggaaagccaaacccacctctaaatccagcattggtttcattgaatagggactaggaaataaagagaaatagagttctttgagagatatcggtaaagtttaccttatgacacgttcttttgtttgatggttatagctaccttctcttcttaagtatctacccatgcagtgtcctttgccttctggagatgagttttactgtgaagatataagcaaagcacttccttttcctttgggaggtttctatttagtttatgagatatacaatagtagaatatctgtcatttgtcctcttcgagaggtttttccttttcaacttgaatcttgatcaactttgatggtatccaaagattttcttctcctatggaaaccaatgcaaaacccctaccccatcatgtcacatgttctggtttcaatatagaggttagtacatctttgaagtatactggctgattcaattcagcattttttccccgtagttcagtgtctttctgcagccgtttgtccttttttgttgtcattaagaaagtttagtgttaataaagcattatgcaacctatgtttggggggtagtttagtcttccaagcctgtctatggagaatctcctttagtgttctattagatctctcaaccactgcttgtcctgtaggattttgtggtatattggtgacatgctttactgttccaattttgtggagacatatgctggagcattgtcagtttttatttgtgcaggtatacccataactgccatcacctatagcaggtgtgtaataacagaataagctttttcagagttaagaacagtagcccattggaaccccgagaatgtgtctatagtatgatgcacatatttcaagtttccaaattctgcaaagtgaaagacatccatctgccaaaactcatttctccgaatgcccttagaattacaacctgctggcaatggagtttgattataaaaggaacaagtaggacagtttctcactacctcctttgcttattgccaagtgatagagaagtccttttttaaacctttgctatttacatgatgtttcttgagaaattctgaggcttctagcacacttccaattattaaacaatcaatctcatcactgccttctgctagtgggcttggcagatctgtatgggatctgatatgtgtaatgtatatagcattacttctgtttctgattgtttcctgcaattgtataaacagtgaagttaactctgtattatcaggaatgaaatctgtggtctcaatgtgtagaacgactctttctgcatattgagaatcagtaactatattaaaaggttctgtaaaatccatgagtaccatgagaattgcatataattctgccttctgtatagatgtatagggactttgaactactgtacttacctcacctgctttataacctgccttacctgatttgttggcatcagtgtagatggtaagaactccagaaatgagagtttgtcttacaatacgtggaagaatccaggatgtcttttttatgaatttaattctgtaaattttgggatagttgttgctaattgttccccaaaagtcagtaagtctattttccaatattcattattcttccacaagaaggaaatttcttctttagttaaaggtactgtaatttctgctggatcttttccagtcagttgtcaaagccttaatttgccctttaaaatcaaatcagaaatcttttctatatatgtctttaactttttattatgtttatgtggcagaaatatccactccaatatggtgtcttccctctgcatcagaattccagaagggtattctcaggatggcaagataaccagaatacagtctaaattaaagtttatccgatttacatgtgcatccaatattctgttttctacacattgtaatttttttatgcctcagtggataatattctgggaccattcacgtccttatcacctttaagggccattttttaatgctttaagtaatgtccttctaccccaataatcgtctgtaattgagaaatttttcctagcagcttctgaaaactattaagagtttgataacgattctttctaatttgtaccttctgtggcccaatgttttgtaagtctaatagaatcgcctctttgtatcttttctgggacaatctgtaaaccccaacaaggcagaacttccttcaccatttcaaacataggttccaaagtttccttattggaatctgataaaagaatgtcatccatgtaatgataaacaagagattgtgaaaatttcttatgaattatttccaaaggttgctgtacaaagtgttgacaaaaagtaggactatctagcattccttatggcaaaaccctccactgatatcccctaactggctgtgaattattaagagttagtaaagtaaatgcaatttttttctctatcattttcctgtaacggtattgtgaaaagactgtctttcagattgatcactatgatcggccatcctttaggtatcaaggaaggcaacagcattctaggttgcacagagcccattggttgaattaccttatttatggctctaatgtctatcatcattctccacttacctgactctttttgataacaaatacaggagaattacaagggctggtagatacctctatgtgtccagcctctagctgttcctgtactaacttttccaaagcctctagcttctcagaggtcataggccattgtcctacccaaactggttcatctataagccacttcaatggcagggcctttatctcctctgatggtatatcatttgtacctagtttctgtacagcctggatggttggtaaccattttccacagtgtcttaccagatttctagtatctaaagattataaataatttgtatctgacactggaggaatattaatctgagtattccattgctgtaagagatcacgacccaagatttatagctgtatctgccacatgtggtttcagtctccctttctgtccttccggtctcatgcagatagagttccaattcctaaaaattgtacatttgcctctctaagaggtcaattctgaggccaagacttttgggtaataatagtcaccgccccaatgtacactaagccagtaataactttattattaattctcactttcaactgagggctcttatcattaatagaagtttgccaaaaatacgtgtttcttagtttgtccattcacattttattcttcattgctagacaaactaccatctagcacagtattatttttcacaataggcaaagaactatctatttgtcctgtgagaaattttcttccactgctgctggaaatgacgggacctttctcaatgtggggggacttcttgaggccccccttgtggtttccaggccttaaccagtttccttgcatattcctggtcgatctgcattcattggtccaatgtctgcccttacatcttctacacaatccagaaggcagtggcctttcttatgaggcattgttagaatttgtttgcctacaatttctcttgatatgtcccattctaccacagctgaaacatctattttcctagtgccttcatggtctcctggggaaggctcttcctacccaaggttctggttcatagtagtaataacttctggcctcttggtacccatgttgacctctgtcaggtgcttctccttcccaagcccttgcatcctaacctctagaacttttaatctcctgttccctttttaaatcttttgagatggcttctcctactcaagctccagtatcttgcacattatagtcaatgttggctgtatgcaaaacccattcttctagcagagctgatctgatctttaaaggcaaaagtattcttttgcatattgggtttgcattttcataagctattgtatatataattgattgttttgtttctggatatgttacctgtaattctattgccctagttaatctttgtaagaagtcctgaaactgttctgtcggtccctgttctattctggtataagcttctaggtgttctcctggctcacgaaccttatcccaggcgtttaatgctgctttcctgcataggggcaaaatatggtcatcatattcagtctgagactgtgggttagcataaataccctcaccaagaatcttatcaaggggggtttcataaccttcctttatgccttgactctcaaggagctttgtctcttccctgaccaatgccttccactggatttggcatgaattctcaagtacagctgacaccaatcattcccagtctgtgggcatcaccgtgttaaaggttgcccatgaatgtaatagctgttttatgtatgggctatggagaccatatgagacaactgattctttagtagtcttaagatccttcagctgtataggttgccatacataagccatctgtccctgagggtttttcttagaagctggcttttctatcatggtagctgggtagacaaatggcgtacgagtaacaatcttagaagaatagtcatgatacctgggtggattaggtgcctcagattggagtgattctgcctctgaggcatcccaatgatctttaagcctagtaatgatattctcagtttcaatttcctgatttccactccagaagcagtaactatctttgatcagcaggtggcgcaggcattcagctagtccacacagcatttggcagtggtcggtcaggcaagatggtggcagtggtggagctgaggtcacacaggcagctgtacttagcttagagagtgtatggcattgcagccgcaaccattgcaaaaggcacgactttatggctgtcacggccaggggaagctgcaggccctgctgaaagctgaggcctactccctaggcctactcggctcaagggcagtaggcctccaagcacaggtagaccgcaatctgggcttgtccagtgcgcgcagctagaaactggtggtaaaaccgtggggagtctgtagaactctcccagctgggtggactgttctgagatgcttagcagtggtgggaagccacttgtgtggcagggccacctgtggagtgagggagtgctttcctggcctagtctgccctcccggtgggacccgaagactctcccaaacagggcctaggtttataagaactctcttctgacaaccagataatgtgggaaattactaatacagagccaggtaaaaatacaagggaatttaatagggaaaagccttacttacagagcaacctagccagccagcggggcagcagtaagtacagcaacctgaagatgaaagcaaaagcaggccatcatgtgagcgtccctcactcttaaattttccctacatcaccctgaccatgtcctggcaggcgtggtcaggcacacctgtagccagcccctaagcaggcgtggctacagcatcccctacagttaagtttagtttagacatagttttaggattcttgctggagtaaatttcaatttcttttaggacctagactgtattttgttctagtgtttgaccaagggttagctttaggttcagactagagacagagacaacatttgtattaggtgtggagatctgtcagtgttatggttaagattatggacaggattagagctaagtttaggttattgtattgattagttttaggatataagaaataaggttatgggcaggattgtagttatgattattcagtgttaggacaaggtttaggttattgtcatgattaagtttaggatataaggggtaagcttatgggcaggattgaacctatggttgcttgtagtcttgaggtatgtttagaactagggttagatgtaagtttaaaaatagagctatatgaggtttaaatttaagattggggttgtggttagagttagtgctaggattaggctaaggataatattgggcatagaatttagtttaaaagtagggaaatgagcacagtattaaaaattggtttttggttgtttaaatctagtttcagtattaaagctatatgtagagttagacttcaattaaggatttggaataggttctgattagggtttttgtaacgttatggttaggattatagatataatctgaggcgattttatgttaatttctaatattaaaatttgagttaggttatggttaagccatagatcaattttacatatataaaaatgatgctaatttttagatgttgggttaggggtaagtttagagttagggacagtattcatattaatttgaagttttctcttaaagctagttataggctgagagttaaggttagggctcagttttgttgttagggttagggttagtcttcctattttggttagagatggatttagctttaagattagtattaatggctgatccagggatatgagtgacttggggttagggtatagggttcaggctgaaagtagggttacaaatttggtaacgtctaaggatatatttaggatagaggagacagtacagataagcttagtgtgagatcgacatgttgggtttgttatcaagttaggtccactgttatagctcacgttagattttgagttgtgggtagttataatcagggctgcattaggattagttttagtttttaggctatggtcagagctagtatttggagtagatgaagatctttgtgtttgtcctaagagtatgaataggattaggtcacatttaatccttagcattaacactagacttattacttatttgtgttagggtagtctcatggctagtactatagttacagttacttgtagtcttatggaatattagagctgagtttaagatgcaattaaagtataaacttacaaatatagctgtgttgtgataaaatcttgattgggtttgggttaggcaaatagctagagttgggtttaggtcagtggtaaagcattgaactgagagcatatgaaaatagtcaatgggatagtgttaggcctacttatctacttaatcctagatttagggtattgactacgttcaattagggttatttcataggttagagttaaattatggcttgggttagtgttaggaccatggacagttttatggttacattaggattagtgttaagggtaaggcagttatagtaataattctaactttaatgttggagttatctgtggtattagagttagaggaagggctagagatacttttagagttatctataataatagttttagagttattcatagacttgtgtttatggttatggggtgctttgttgtttagttttttgtcagaggccatggaagtatacagcatatggaaattgataattcagatgtcaacccaccagagttgatgtgattctatgatgaaggttgatcctgtccaggcaaggcctgcagaaccatcaactctggaaactgttgcttacatttgctaaagcaacttggtattttcccaatacctatattgttgtgtataacctcatataatgtgtatatgtaatctcattatcacatctcaatcttacgggcatatatatctttaatgatcaggaagatgacttttcattcactgtataattttgatatttagaaaatatagtaggagatgcttcataaatagatttatgtattccatgaagactgtagacacttaaaagtctactttgtttcttttgctcggactaactgcataaagttaactcatttttacctcacagcaagttcaaactagattaaggcctttttgtaaatagatcataagtttagaagaggaggggaaagtaggacatgagggagcaggaagattgagtcaggggaagaatagaggagagcaagaaaagagataccataatagaaggagtctttataggtttaaagagaatatggcactaaggaaatgtccagagatccacaagaatgaccgcaatccagtagctgaaggaaacagaagcagacacccacactgagactaaaacactgatctgaactcctggaatatagttgcagaaagggagtagtgatgagcaaagaggtcaagacccacaggctggagagacccacagaacaagggggagctcatggaccccagacaaactgatagctgggaaaccagaataggactgttccagactccctgaacatggatgtcagtttggaggtctgggcaatctatggggcctctggaagtggatcagtatttattcctagtatgcaaacggacattgggatcccactccacatagagggatattctctcagcctagacacacagggaaggttctaagcccagctccaaatgatgtgacagattttgaagatcccccatggatggcctcaccctcctggggagcagaaaggggatgggatagcgagttggtggggggcatgggaggatgggatggagagggaactgagattgacatgtaaaacaaacttgtttctaattcaaattaaaaataggaaaaagactgtgtaatacatattcagccatcaattataatctaaacaaaataaaaatacttaagataaaaagaacacattcaacaacagaaagactaatatgatgctgccagagtctagagactctacaccagcaagaactgaacagccaaatgcagatgaaggggaagagaaggaccttaaaaacaactttatgaagatgatagagactctgaaagaggaaatgaggaaatcccttaaagaaatggtagtaaagacaaacaaaaatacaggaaatggaagaaaagacatctgatttttgataataataataatttaaaaagccagaaatacacaatgggaaaaatgacaacatcttcaacaaatggtgctggctaagcaggatggctgaagtagaagaatgcaaatagattctcacctaccattctgaactaaactcaactctaaatgaaccaaagacttctatataaggccagatacacagaaaatgatacaagaggatgtgagaaatagcattggcacaggaaaatacgtttaaagaggcacaagcactaagtacaactagtaaatgggacctcatgaaactaaaaagcttctataagttgaaggacagaatcatctggacaaaaggtaagcctaaagaataaaaaaagatctttgcaaattacatgtctgatagagagataatatctaaaatatataaggaactcaaaatcctagacatcaagaaaaacaaataacccaattaaaaaatgataatgatctaaacagaattctcaaatgataaaaaaaatggatgagaatcatttaaataaatgttctgcatccttagtcatcaggaaaatgcaactcatactagtttaagatttcatcttttacaagtcacaatggccaatatcaataatacaaatgacaactcatattggcaaggatgtagagtaaggggaatactcatccattgctggtaatagcgcaaacttatacagccactatagaactccatgtaatgtattttcaggaatcttgtaatagatctaccacaagattcagcgataccattgttaagcatacactcaaaggattcttgttctattacagagataaatctcatccatgttcactactgctttatccataatagccataaattggaaacaactaagatgatacttttacaaaatggagtattattcagctattaaaaaaaaacactttcctacctcatggatattttgcgtaacttatgatgctttcctattttgtttctcttcatgggatttctgggtgtgtaaatgtgtggcatgtctccacatttgtatgtgcttctttctttgtgctttttctttgtctctcttttttctatgggcttctttgttttgccttatttttgttgattggttggtttctattttatcttatttttgggattcctgtttgttttctaataagagagaaaaagagtgtgggtttggtgtgtggagatatgggggaggatctgggagaacttggaggaggggaaaccataatccaacatatattgtagggagataaaaatctattttcaattaataaaaagggaataaattgatatttcatctttgatgggggaatatctttctgtatatatgtttctcttattggtttgtggataaaacactgattgaccagtagccaggcaggaagtataggaggggctaccagaggaggaggattcagagaatgagcattgagagagatgccatatagctgcttaaggagtaacatgctggagcattctccggtacaatagaaatgtgttaataattaagagagagctagccagtaaaaaggctgagccttcatctgaacagtttataattagtagaagcctcagtgtgtttacttgatgctaaagggttgtgtgatcaggtggaataggaactgcatctatacatttttagccagtgagaagggcagagatcaacaacaacaacaaaaaacaaactctcatgaaatgctggagggaatgtaggaaaaagggaccactcattcactgttcttgagattgcaaactagtgtatccactatagaatcagtatggagaacactctaaaaactaaaagtaaatctatccatatgacccagggtataccacacattggaatatgcccaaaggatttgatattctacttcgcaaataagtgctcagatatgtccattgctgttctatctacaatagctagaaaatgataacagcctaaatttccaccaaatgattaatggacaaggaatatgtggtacatatccactatggaatgctattcagctataaagaaaagtgaaatcattaactttacaggtaaacagatggaactaggaatagtcatattgactctagtgatacagacacagtaggaaaattgtaaacgtattttatctcactgcaggctcctaacttcaaatcctcaaatgcaagcaaatatccttgaggaactgtagaaagaaagataataaaaggggaccattgacagcacaggggtgtatgtgtagtagcggggggaataatagtgtacatgtcatctgatcacggaaatgggaaatcctaggctctctaggaagaaaaatacagaagaaaaaggaaagaaggtggtagaggggaattacagtataaaacagatcaaactgggtattgtgaataggggaattttttagggcaaggggacaaagatagaaggaaaaaaagacatacagaatcatactgttaaccttatcttcaaaaatctatatacatgtaattctgtgtataattaaacatatgtagtttaaattaactcttctcatctgggctaactccagactaccatcaaaaactagacataagaatccttgttttgagtcagtggtcaggattttccaagagactatcaaaacatacagcctattgttgttgctcttggttacccccagaggtggaaggtactgcttatttttgaagacaccattcatttcagacacacaacttagaagcccattagctatgattaatctgaaatcctccattctgaggactccttttcatgatataagtaggatctgtgaaagctgccaaaggaagaaagcaaccatagtcacacctcaccaccatgccagtaaagtatgtcaatgacaaaccagcatagcatgataaccttgagtgctgtagtagcatatataccttggcaatagccaatggctctctaactggtcttaagagccaatcatcaagaggaaaaacatgcttaatactgaaaatctaactaactactcaaggttaccaaagttgtggattttggagaagaacctactttactaagccatcataatccctaaagatctaagcatttgtctgcatacccacaggtatgtgtagtcctcacccgtcatcaaagaaaaggctttttgtcacaggcatgtgtattcctcacccttcatcaaagaaaaggctttttggaagaatagggaaaattacacacacacacacacacacacacacacacacacacacacacacacacacaccacaacacacacaagcaaaacactgagttgtgaagccaagtctcaatcaatacatttataaaccactctcagatctactggtcatggaacattttagaagagggtaaagaacagctgccatagacagtggattagacagtttgctatgagattgggactcacagtgaattcagaagctacaaaaagtgtcaccaaaacatcaaagtggctcctaaacctcagctgagcaaggatgagaccaattgccaaagtggacagagaaaaggccatgagacctcaactctacataaagaactacaaaactcagagattctgaaagtggaagaaatagtattctctgggtaagggcataatagctgtttatctaatatgaaatgccaagcccttatatgcatgcttatgcatataagtaacaataaacagagagtagattatatttaagaatatctatgtatgtacgtgtgtatcttgcttgtgttaacttataattttaaaaagaggtcatgaattagaaggagataacagaaggttatatgagagggtttgtggggaggaaagggatgcaagaaatggtgtaagtatattataatctcaaaaacaaaagaaaaaattaaataccactatctctaaccctagactaaacttggatactaatctaactcctagttcttttaataaacttaaccctagctcaaatattagcccagaatataaacctagacataaattaaattgtaatcctacatccaggcactatttctgaactaactttaatacttgttcttacaataactgtggctctacactaagtaacacaaatatctaacttaaccctatctgtactatcaatactggatctgccaacaatcctagacctaaacttaagcatagttcttgcattaacaccatggccaataccaatcccagggccaacactaaccataatgacaaacacagccctaaacttaaccataagcctgacactaaactgaagctaaacttagaaataataatactgttcctaggcctaattctaacactaaaactatctctaactctaaaaatagtatcagaaatgtgcctgaaactgtccctagctctaaaactagttcatgtataacagtaactaccatttcctcctgctctaatggtaattttagaattaaatgaaactgtctttatatttaatactaaaactagatatttcccaaaccacaacccaaagtctaacctcctttactgcacacataaccacaatcagaatctcaaaacaacactaagactgcagaaaaaaataaaataaaaaatttaaccctaagcctgcatctcatccaatcaccaaaactaggacaaaagttaaccataaacaaatgtctaacattgactgtaccccttaccctaatgctacaccaagctctatactaaacccaagtcctaagcctaaccataagccaacacctaaattacatgctcacatagtcaacttcgtaactttaaatctatccctaatccttaacatcactcaagattttttctctgcctacatctaactgtaacaattcagttcttaccctaaatcataaaatatcactaaatatacccctagacatgaatgaaatagtgaccctatatccatccttaaccctaaaataaggtttaaaagtaactttaatcctttttctagtgttaactgtagctgttacattaactttatgacctgacctctcctggtgatctcctcattcaagaggagggcatagctcaataggagggtgggggcacaagggggccaagactgaggtgtggctagactcagggtggtccatcctctgaatgtgttcttatactgtagtcttcccatcccctcttccagtgggtgcagtccctctcctctcctctcctctcctctcctctcctctcctctcctctcctctcctctcctctctctctcctctcctctcctctcctctcctctcctctcctctcctctcctctcctctcctctcctggtaggcatatccaggctaagactgctatgttgtcaggcagaatctggatggtttggcctgctggggcattgtagagagggaggagggatgagcaaaggggtcaagactgtgggaagaaacccacagaaatggctgacctgaccaagtgacagtacatggaccccaatcataaagttgggaagccagcattggactgaaccaagccctctgaatgtgggtgccagttaggagacctggtatgggacctctgacagtggcctcgttcattatctaaatcctcctgctccatgagcctgggagatatttccaccctctgatttcttgctccagtgtcttaaaatttatattatacaagtctgcaaatatttttacttctccctttcttacttgtatccctggatctccttcagttgtgttatttttctagctaaaagcttaaatactatattgaaaaggtatgaagaagtaactgatcttctacaagaggccccatagatttctgaggcctcctcactttatcataatttttaagggatcttttcaataggttccttcccgggctgttttttttaatatttaattttttatttaaattagaaaaggccttccatgggggattaccaaagtctgtcacatcctttgggggcagggccctcccccatgtgtctaggctgagtcggggctcccaaagctcattagtgcactggataaatactgtttccacttccagaggctccatagactgcccaggacccccaactgacaaccatgttcaggggacctggttcggttttatgatggttccccagctgtcagactggggtttgtgagctcccttttggtcaggttacctgcttctgtgggtttcccagcatagtcttgaccccttttctcatcactcctccctctctacaactagattccaggagtttggctcggtgattagctgtgaatttctgcttttgcttcagtcagctactggatgaaagctcaaaaaaaaattcttagatgtcagaggttgtgaaaatatttaaaaaaaaacagggggcagggaggcagatagaggagaaagaagacaggaaaaggagggggtggagaatctgagggatcaggaagattgaactgagaaagagagcaaggaaatagacaccttaatagagggagccattatgggcttaacgagaaacatggcaagagggaaatctccagggattcacaaggatgaccccaactaagaatctaagcaatagtggagaggttaccttaaatgcccttcatttcttttaaatttaaattattttttttggcaaaggatggggtgtgatgtcacagaagctttcaactcattcttagttatgagtctgcagtaatcaacactgttctgcatcgttgcccatagcagccagctaggactgaccatggactttgtggcagcacagacagacatcagcacagcctctggcagatgcacagacctcagacatcccttactcagcaatggcatgcttctttctctgatggagcaatacttccattcctgtcatgacactgtgcttctatgtctctaattttatttctttataccacatgaccgtatgctagggtctgctcaaacatatttttttccaattccatgagattacttcaaatttgttgtcataatttttaattttattctacaaaccaaccacagtttcccctccctcctctccattacacctccccaactcccagctactgcccccaatccactcattctctgtcttcattcacatgtggtaaggtctcccatgggaatcaagtgtggcatagtgagttgaggcaggaccaagctcctccctactgtatcaagcctgaacaagacaccccaccatagggaataagttctaaagagctagttcatgcattagggacaggtccttgtcccactgctaggggtcccacaaaagaccaagctacacaactgtcacacacatgccaagggcctaggtcggtcccatgctggctccctagctgtctgtctagagtctgtgagctcccacaaacttaggtcagcgtctctgtaattttccctgtaataatcttgacccaccatctttctcatacattctatctaccctctcttcaagtggacaccagaccttggcccagtccttggctgtgaatctctgtgtctgctttcactaggtactagataaggatctatgatggacaattagggcaaccaccaatctgattacagaaaaaggccagttcaggcaccctttccagtatttctaggggtcttagctggggtgattctgtgggtaactgggattttcccccgtacaaggtttctccctaaccccatcatgcccccctctatcaagatatatcatatacttcatcactgtctccctctgtccgtcccacaatgccaccatcatgctttttcatgtttcatagtataactttagtttgtatcaagttgacataaaactatccaaatcagcttgggtcctttgactgggttattaagattacatatgctgaaagttatcagtgagcagtgtttgttgattacagttttgtggtggtggtggtggtagtgcttgtagcattgttattgttgttgttgagtgtttgttttcccctcttttgatttgctagtctgggattctttattacttgtattttcttgttgttgttaacctctttaggttgattttttctagagatttctctagagatgaatttgtagatagggattaaatttgggtttattgtggattatttttctttctccacctgttttgattaaaaatgttgctaagcaaaacagttttggctggcatctgtggtctctctgagattttagaacatatgcccaggcccttctggcgtttagagtctccactgagaatcaggtgttattctaatggatttgcctttgtaggtttcttggtcttttccttttggaacttttaatatcccttctttgttctgtacaatttgtgttttggttattatgtgtcataagtaattttttatggccagtctgttttgtgtactgtaggccacttatgcctgtataggcaactctttctttaatttagggtaatgttcttgtataattctgttgaaaatatttatcctgcctttgattggagtttctttttcttcttttattcctattatttgtagatttggacttttcataatgttccagatttcctgaaaattttgtgcctggaactttcagatttaacattttctttgattgaggtatctgtttcttttatcttatcttcaatgcctgatattttctctttatactcttttactctgtcaatgatactacttgagattctgttttttgaattactaaatttttaatttccagttttgtagcagtttgggttttctttaaggattttatttctacttccatatcttgaactgttgtcatcattaaattccactgtttgtgttttcacagacttcatttagagattttttattcatatcctctttggcatcattaaatatattcataattactacttaaagtccttgtcttgtgcttcagttatatttatttcttatggtttactttagtagtgttcccgaattatgatggaggcatattgtcttgggtggagtgttaatgattgtacttttgcactggtatctaggcatcagtgtttcaaatgattgtgattctagatgttgatattaaaattcttagagggctaatttaaaaaatagcatgcaataactgagaacagaaattacaagtgccaaagatgatttagccatgtttttaattttcattttaatggtatgttgaagatggtatatttgatcagaaaatcgagtgttgaaccttgcaagattcattatagaaaaaggaaaagatcatatcatgatagttgagataaaactgcctaaatgagacttcccgtctgccgactccaggcacatagaggtctattaagtaaaattgttcaacactattgtgtttcttaacatgaggctgtaaagctagaatagtagcaactgcaggtagacacattggttatcataggttaattatgactgggaaatttttataacttactttcccctttactcaccaaatatctttgcttttagtgtgtatatgttgagagtaagggaatggtttagaaacattcatttttttctgaaaagcctcaaaattgtcactaatccactcatgtggtcaagcatcatcattaaaacaaatactgtgcgtgtgatgtgtgctcatttctcacctttaagcatcctcttgtccagttaatagtgctttcatttatcactagttctttttcaggaggtgctctgaagtctaaatagccaatattttttggtttgctctggtgtgaatggacatggaagtttttttttaacactaatggttgtcagtaactccccatttttggtgaagcaaacctcttcctggcctctggtggtgaagtggacatattgggtggaatgcagcacctgaaatagtaggcagggaatgaaagaacagatactagtgatgagcacagacaatcagggtgcctcttccatgttactgatggttctttcgtatcactgtatgtgctgcttggagggagatatctctaccactcgtgaaaatatttgtttttctatcttccaaatttgtgttaacttatggagggcaaagacattggagtcaagtaataggaacatgaatgcactggataaagatatgtgcacagacagacacatctataaatatgattctatccaattctctaccacagaaattatgtagcatctttctctgtgtatgaccaatacctagggctaaaaaatacaatactgtcctcaatgtggtgtaattactgcaaaactgaacctgttttatatgtttctgctgtgctgttagaagatgcagagatatgagcatactaggtaagtgttatatcattgaactccattcttagcctgcagaacatctttcaattaggggcacttctgaactaatgagtacagtttcccaaacctttgtaaccttattggatcaactgtttgctcatggctcatgataattcctgcaattttccatttgattgtaatgatgatattactttctacctggagtgtccacaccttgagcacaaacacacatttttcacattttctattctcatttttccaaaatgcatgggcatttcctggtcaatacttgtaccataaaaaacatattagatgaattatacaaggagagttctgaaatcaggaggtctcaaccaagacaaattatttttgaaatgggaatccaaggcaggagcaagcctgctgtcctgatggccaggcatgaaaatgcagataaagtccacagaaggaagactttaccaattaagaaaatgtttgtctgagcaaaacagttgttgggcacagaattgcatctaaagcacacatagaggaactcagaggttaaggatacttgctgctcctacatagggcttgggtttaattctcagaacccttctgcatgttcaaaacttcctataaatccaattccaggagatctgatgcccatggacaccagacacacatatgtagacagtcacatgcacatgcatgtatttgctaacccatgtgtatatgtgcatgtgtgtgggcacacaacgatgtggtatagagctcagtttctgaagatagttgtatgagactagaatcttctttgagcaatgtcccttgtgatcttgaacatcctgttctgtccctcagttttcttgaagagtctaagtagttattattttttagtaatatcagttgtcccaattcttgagcatggggcttccctccactcaatagaatctctttagagcacttctttcagctgtttaaattaattattgttgaggtctttcacattcttaggtaattttcctgtttattttagtggaaattgtgagcgcaattactctcctgatctcctgatctcgttaccatcacatttattattaaatcattactgtacagaaaaagctattctgttcattgttgttttgaaaaaaatattgttatcaaatcaattctggctgaataccaatagatcagtaagaaacagaagaacaagtatgattagtgtagacagtgagaggggaccagaatgctatctcattgccttctgctgccactagaattgtctcaaaagtcacggcaattaacatcctggtacttcaaggaaacactgtaaaaatcactaaactacaacaacctctttaggattttgtgcttatgtaactcaagaccctgctggacttatttgactgaattcctaaagtccatgaggcaaacatatttggtttacattacagagcaggcctatgaatgaccagtcacctagatcttgcttttcaggctgcaaactccatggcattctcttaatactgttggctcaagtccagacctttctaaacttgtcttatctccctttcagactgtttgtgcattctacttccagtcacaagggattatatttatttgtttctgtcattgaaacatagcaggtaaagaaggagtggtggtgcctgattccaggcacaacatttcacacatatgactcctttctcttatggacctcatgctgcacatcagcactagtatttagggcctggctatcaggacaactgtgatgactcctggtccttctcctggagagtagatcatcaggttatggtaggctactaataaggcttctactgctaggtaagcttggtaagtgtctgtcaggtcatggagttttaaagtagacagtctcacactggtcatagtttccaacccagtgcaaatgttcatttttgctctagcattttggggagaatttccagttcctgatcacctgaatccctgaagctcctcctacagtttcgtcacaagattgctccctgggtataaggctgggttctgtgtcatcaagaagtccttaaaaccaggcaggcttcatgatgtaatggccaggctcaactgccctgagctacaaaaacccatttttgacaaataagctaaaattatacaatggaaaaaagaaagccttgtcaacaaatggtgctggcataactggatgctgacatgtagaagattgcagctagctccctttctaccatcatgcacaaaacttaagtccaaatggatcaaagatctcaatataaatccaaccacactgaacttcttagaagagaaagtgggagctacccttgaacaaattggtataggagatcacttcataaatacaactccagtagcacacacagtgagatcaacagttaaaaaataggaactcctgaaactgagaagcttctgtgaggcaaaggacacagtcaacaagaaaaaacagcagcccacagaatgggtgaagattttcaccaaccccacatctgacaaagggctaatttccaaaatatacaaagaactcaaaaagctagccaccaaaacaccaagcaatccaattaaaattggggtacaaaactaaatagataattctctgtagaggaatctgaaatggctgaaaaacacttaagaaaatgctcaacatccttagccatcaaggacatgcaaatcaaaacaactcctgtcagatggctaaaataaaaaacaccaatgacagttttgctggagaggatgtggacaaaggtgaacactcctccactgctggtgtgagtgcaggcttgtgtgaccactttggaaatcagtaaggcaggttctcaggaaaatgggaatcagtctacctcaagatccagaaattccgctcttgggcataaacccaaaaaatgcacaaggacatctgttcaactatgttcatagcagtgttgtaagtaatagccagagcctggaagcaatctagatgcccctcaaccaatgaaatcttgaaatgcacaggcaaatggatggaactggaagaaaccatcctgagtgaggtaacctagtcacagaaagacaagtatggtatgtactcactcatatatggacactagacatagaacaaaggactactagcctaaaatgcacacctccagagatgctagtaaacaaggaggaccctaagagagacgtgcatggtcccccaaagaagaggaaagggacaagagctcgtgaacaaattgggagcacagagggtgaggagggagggagggagggaggatatagagatatagagacgactgaaccaagccctctgaatgtggatgccagttaggaggcctgggaagtctatgggacctctgacagtggaaccagtatttatccctagtgcacaaatggactttgggagcccattccccatggacggatattctctcagtctagataaaagaggagggccaaggtcctgtcccaaatgatatgacagagtctgatggaaggcctcactctccctggggagtggatggggactgggatggggggatcagtgaggggcctgggaggatgggagggaactggaattgatataataaataaaaataaaagaaaagaatatattctagattacatgctggagaatcagggaagtacagtgctatgggttctaactactgccttgtataagtcttgaagtaagaaaataatgctcaagtgaattcaaaatttgcacaatcagaaagttgggaataccaagtagacttctagcataccataatgaaaagaaaatatgttaaaaaaaactgatcacagtaggaaaattcagaaaaaggtggtacagaaatcaatggtacagaaaaaattaatagattttttaataggtaaaataggagccaaatatataatgatatagtcgttttgaatgacctggtgactatagtgaagaggcctttctaagtcagcctaagacttccccttaccccgccctcacgggcgtgttcccgcacacctgtccgggtacctggggcgggactagagtctttctacaggtgtgtggtacaaacttgtcaatttttacaatgcaggaaatacatacatgttttaaggatgactgatacctcacattggtacatattccatctatgtatcatctatatctatctatctatctatctatctatctatctatctatctatctatctatctttctattatgtgtttttgaggtgtgtgtgtgtgtgtgtgtgtgtgtgtgtgtgtgtgtgtcttttagctgcaaatcataggaaaactatgatggatctgcacaagcctttacatcagtattggggaaatgcccaattcttccaatactagcttggttttcatagaaggagaaatgctgaggcacaggctcaggctcaggctcaggcaaataaaaatttatagccaccattggaagcacagcagaaaggtcctcaagccatcagatctccagagaaaccaggactgttaagcacactggattgtctttccaatggaaaagaagaaaaacctgttcttgcatccagaaagatgaaaattggaagtgattaacagcctgatgatctgcattatttgttaagacaggccatatcaagctcttagtaccagggccagaggttgctggtaatctaaataacttcatagccaggagctacctaagctcccatgaccaggacaaaggtagctcatagcccaagatcaggctatttgtacaaccaagatcaggacagaccattaggcccttaagctactacaggtagtacatctctaggactcattttcttagaagaaatgacagtatcctgagttgagtttcaatgcacttggactttcttgtgcaattgagattatattacaccagggaacttttccccaaattattctgggatgaaatacactgggaataaactgcctgctattagattccctgaagtctggtccaggtttacaaagtcaatctgcactgggttttcattatctcattgcacagttcattccctgtatgacacctgcaggaaacccctcaagtcataatatatgatggctatattttgcaatacatgtcactacacagtgagacagggcacagttagtccctggtgtataatgtttcaacataagaatttttgaatttacagtgggcagaaatactaggcattcagcagaaactgtacttaagattatagactgtggcattttcctgcacatgtgacatgacaccatgatcttataatgttgggaagcaacatctttcccagcttccagttacctataccactaggaagatgtacaacaaactccatagcttgccatgtgtttggtagggtatgtgtattatgtgtgcctcaactgataatgatttcaactgatgatgtgctggtcttgactcaatcacattgtaagtgtaaaacaaacaaacaaaaaccagtcaaagagaaattactccaaaactacttgtttaagagatttcctctttccgggtatttcccttacatgagggattgtgtatacagagggcatcttggccatgggctctgactctggcatggccatcctccaaacacccactggatcagttgctgggggccgcaggcaaagtttggagtgggatgaagctggttggatagaaaagactagagtgctctacagggcctgggctgcccagacacgggaaggtagatcctcagtcccaaggtaatattgggtaggaaggctgcatcttcttttgcctcagacacagtgaagagaatattgaggacattccaaaaaagttagctttgaatcttagagagtaaaaaaataatgtttattgtttattgttaagttattttctgtttagaaagtcctacaaaacattcccaaggaaacttccttggaaagagaaagggtgacaaagaagggttgaatttaggtatacattttcttaaagaaggaagcctttcggtgatttcaatatcaacacacacacacacacacacacacacacacacacacacacacacacacacacacagagagagagagagagagagagagagagagagagagagagagagagagagagagagagaaagtagatagatataaaggaaggctttcgttttccagagatgagtaaagagacacataaggtgacaggcatgaacagacacacagattcacagtgaggcagaggcaggctgtcagcagcacaggaacaaagaaatattcatctaataaggcagacatctaacagccagtatggaatggatataacagagaaacacaggaccatcggaggcaactcagatgtagaaatatacacaggcactccagtgtccaagagacagaaatgtcattggtgtctcaaatacagttgaagacagggatccttttacacaggcagatacatggacacagacaaaggaggaaggcattaatattaacagccacagtcacaagaccagagctcagtgaacataagagacaacatgaatgcttgagacagattctttcagttagagttaagacagacatgtgacagggaagcattgaaatctcatctacttcttggcatctagcaatgtaaacaggttttaagatcgaacattttagtagaatgcaatccaaagataaactaattggatgcctatattctttttttccattcatttatttagctcataaataaagtcatgcacacttatgatacacaatacagtatgttcacaatggcatggttaaattaaaccaattaacatgttatatcacacatattaatcatttttgttttgagaacacttaaagtatactatctcacaacttttaaaatataacatattgttatcaaccatatttatcatgctttcagtagacctcaagacttcacagagtccatgcctcttgtccaactgcagttttatatccttaaaccaatcatttccccattgttaaaagacccacattgaagcctaatagccacaattctgctctctgttcccataagttcatcatttctaggttacacataaaattgaaattgtgtgacatttgtcttccagtgtgtcacttatttatttgtttatttatttatttatttattgtggcaagcatataactttactacttactaaagatgaaatcaaatttgcatgcacaggtgagcactcactgaaacaccttggattcatcacatatttgagtttcaattagcatatatatatatatatatatatcaataatggcaatatgttatgcatcaatagcagcaacagcttttccaggttctgcagtcatttgaacaaaattgtgttgaatttctacaggaagatactgatgcataccgttagtagttgttgaactatttccccacatggctttctcattagagctggcttgcagagattcttggttgtcaccctggactaaaaccttaactctttcactattgtgttacctgtgtccttacatcaaatagctccatctctttctttcatttcttgtaaattgagagtgatttttctctccttatccatttggcagtcatgatgcctaaatatgataagtaatctaaacagatcacattttaggaaaataagaggtgtctatttcataacagaaaatatggtaattatactattattaataataataagtataataaaacataataatgacagatcagctgggtgattcctgtagtagtttgctgggatcctaggaagatgttgtcaatgtctgtactctgaaggacctgaaggggcaccagggagcaggaaaagtgcagagccagagaggaggatccatgaataccaagtgtccatcataccattctgctcaagacagagcaggggctgttttcattctcttcactttacagaagagtggcctcaggatcagaaagcgggagaaggaatctgtcttccttgtcttgggcgggtcttctcaacctgtgaatggccatggctgtgtggatttgttttggagtcctcacaggaaattgctttttgctttctttttttccctttaaaaattctgagattataaagtaattacaatatccaccccttcatggcctcttttccattaactgtgatgtcatgaatatacacttacatgtatatatacatacattttcctaaatatataatgctcagtctatgcaatgttacttgtgtttgtgttttcaggcctgaccatttgatattgagtagctaattgatatgttgttccctagggaaaattatctctcccattctcaatattcgttaatcacccgtagttctttgtatatggtataaaaaccttggtcttcccctcattcactttggcatgtgtattgatatcatccttgttcagatcatgtttaggcaaccatgatagtgagactttattggtgtagcttctgaaattgctaggagaaacatatctcatagaaaactccctgatcctctggctctcacaatctttctgcctcttcttttacaatgttctctaagtcttagctattggagtattttgtggatgtatcagttaggactaagttccataatctgcattttgattcattgtggttttctgtaattgtctcctttggttgcgatgaaaagcttccttgatgagggctgaagattgcacttatctctggatatcagagtaagtgtttagattgctgttaaggaataagctggtttagaataggagtggttttacattctcctccaatattcctgaattcactagtgctgaatttccacaatggctaggtttttagtatcaggcaagttgcctttcttctgagtccaaatagagaactgcttactgccatactatgtatgccattcctctacacttagaactattgtgttattttggtcattgacatagttcatggattctatagaagagtaggactgttggtttccctcatctggaagcttatacggtgccttctgatactacgaaaatgaatacccagggaggaagcttcagtcagttccagctcaggggtctttgtgtcgagtttctaaagtatatgctatcttcagcaattggtactaacctttcacttctggagggaaatcaaggtcaatgacaatgggctgtttgttttaggactctctggaacagtcctggccaacaactcaaaaagggcttctcatttatggtgtggagtttgtgttatgtggtctttgacttttgaagggaatattgtcagcccagatgaaagaaattcattatatatatatatatatatatatatatatatatatatatatatgcacagaatcatgtgtattatacttttaaaataaataatgaatagtataatttcttatggattttcagatatcttttttgggtttgcttctaactgctgccttaatgtgtccacacctcactcatcagagtccacatctcatcggcaattattgctctgcttttatgggtagtagtccctgtactggaagcttcagagaagaaatgtggctctgttttttctttcttcacagacatctgtgaaggcacagagggcattccgtatttccacagagcaggaccactgactggatccagcctccttggcctgttgattctccagaatatagattttttttttggggggggatactttacctccactgttttctttctggtgctggtgcagctggagtgtgttttcctgtccagagtgctatttcctgaggctcaaagctaagtcctaatatgtgagaggctcttctcctggttttattttttgactctcagcaggactgactatgccacaagcattaattaaatattctacaatataattagttccactggtgtctggtctccttcccccctccctttcaactctcacaagtaatccagggacagactgggtaaccttgctcttgctcctttgtttctagatgtctgaatacaatcttcttttccatgtcatgaccccctactgctcatgcatatcaatttattcaactagggagggactcaactgtgccttgtggcccacttcccacattcttggggctatgctcattttaacaaagaaagtgaaagaagtataaatttcaggctttagtgaaagatacattgaaaactttctggggggacacaacttctttaacaattcagcatagaaactatgcaacaagaagcatcatcagttggatgcagataatgggctgttatgcctgttatttccataattgcctcagttatggttttctttattgcttctctattttcaggtttatttgtttcctttatttttctcttggttttctttaagggatttattcatttcttttttaagtacttctatcatctttatatagttgatttaaccttttgtttgtttttgtgcttcacctatgttggaatattcagggcctattaaggcaggatggctggaatctcttggagacatattgccctggttgttattgattgtagtcacttgcatccaggcatctgaatttgggataattacaggtctaggtgctgattctgggtttgtttttgttgaatgggtgatttttacttggtttttgtttcctttctggaattttggagagtgtgatggctatgtgttgcctgttttcctgacctgctcagatgatgtgttcacagggagtgtctgctggtcttggagcatgggatgcagtaagaaatgaggagactggtgaggggaatggggttaagagaggatggtctgtgagatccataggtgtggctcaggggtgggggtggggtggggaaaagaaggctttaactggtgttctgttgtagcagtagtgaagagactaatggattgcttctgaggcaacagggagagaggagaaggtctgtgggcaggctagctgatttttggtgggcatggcccttggttaagcaggaggtgcttgcttgagttggaggctggaatacagtaagtgggaagagggaggttatgggggatggtgtgtgggatttacaagagatgtgggcaaggggaagggaagctgcagctggtgttctgttacaatgctagggataagactgagagattgggtctggaaaagtggagaatgtctacagtaagcctacctcaagaagtgtttatttgttcttgtttgttaaggtttttgttgttttgttttgtttttcctcctttgacttactgttttggggttatatatttcttatgtgatggtatggttaactccttcaaattggagttttccctctaataccttctgtagtgttcggttggcagctaaaaattgtgtatctttagttttatcatgggatcatttttctttctctgtttagcataattagtattgctgggtgtaatagtctgggctggcatatctggtctctcagtttgtaaatcatctatccaggctcttctggctatcagaatctccattgagaagccagatgttgttctaatgggcctgcttttatatattacttggcctttcccctgtgaagtttttaatgtacttttctttcttctgtatgtataattgatttttatgtgtcatgggatttcatttattctcttttctatttgatgttctacataattcttgtaattattcacattgggaaacttttcttctatgattttgttaaaatattttttacctttggcttcattctccttttactattgatattatacatagatttggtctttacatagtatctcctgtttctgtatattttaagcctagattttttttaagatttaacattttctttgaattaggtaaccatttcttttatcttgcctttaattcctgacatcctctatttattgtcttgtaatctattggtgaggcctagttctgaggaatttgtttgacttcctaaatttttattttccagtttctttttctttaattttggattttcttctgggtattccacctctattttcatattatgaactctttccattattttattcaactcttactttgtattttcttggtcttaattaagctatttttgtatcatatttaaggtccttcaacacttcaataattgcctttttgaagctcttgtcttatgcttctgctatatggtacatttctcagtgtctactatactaagcttactatgttctggtggagacattgttttggctgttcacatttgtgattttgtacatccagagttgttatgttgaggtgtttcttggcattgacctatgatgtatgtttaattgattctctgttctttggttgctgtcctttctggatcacaggcagatatgggtgctgtgagttccctagcagaatttgtttctgctatttggtgggtggcagaaaagaatgaagatggcctaggagaatggtcagagagagttgagaaagagctgggtgaatctgttcttctacaagatgttgagtcttgaggggggtttgaggtgtggtagggagaagggttccttcaagaaggctgcagtaggaaaaacagtcagtctacagagacaagaattaaagttctaggggtaccatgagtttgcaccaagaagtgaatttcccagtcagtggaggtggagtgagaggaggggctcttacaagagtcctgatatattactaagagtctggacagtgtttttgagaacagaaaacttagtgagagtctcctatatgggggtcatctcagtatagtgctgtggatccctagcagaaaagtgtctctggggaaagcagctgacacaaagaaatggagataggctaggaaggaagtctgtgagggttggcaggaaagtaaggaaatattttcctaattgcaacatggatttgtatttagacaaataattatttgtttaacagagtgactatgaaatgcaaacaggaccatgcatgccatttacaaattaccacaaaagcagtgattgaaagctcatctgttttgaactttgcatatgaaggaatgaatgaatgtacattgttaattctgcatgtacaattctacatgtagagtataaattgctttggaagctttcacagtttggtggaggagttacaattactttctgaaaatatttgttcccagaggaagagtatagttcagttgtgtatgtatctccatgctcaatataattgcagtacctatactatgcatagtgagaactctttataaggtagacagtagggtgtgagaaagcagaaactcccatttccttcagaacctacacttgagctttgtggagaccttcatagaagtaaacttttaatttcatcttaataatacactataatgtgaatgaaggactcagaaatctaatgaattactaactggcaagagagttgcaagttttcctgacctgatcaagtaagaagatactgtagtgatgaagggagaggcttgtattacaatatttattgactttttcagtgacatattataaggaaaacagaaaaagtccaattagtccaattcacagggatcagatgaatactttgataaagaaagaacagcaatgttaagagcagcaaacacaagatggaaaaagcattaaggattggggtcaggtgatgtaactcaaaatcccttaggccttagattctctaaagaatcagattgaagcaggtggtgaatgactgacaggatgaaatgaaagttattgatagggacaaaatacagcattatagaattttgtggatacattgttcaccacatttatatatttccttgcccagtgtcagctgtttactttttctctatttatgggtgcaacatctaatttctattaggatagtctgggcaaactttactaaaataagagatcttcttacttagcgttgtgtgcagtaggacatctggcatctaccagcgacctttttgaaggcagccttcacatccttgtttcttaaactatagattagtgggttcagcatgggaatgataacagtatagaagacagacacaattttgtcttcttccagggattttcttgaaccactccgtatatacatgaagatgagggtcccaaataaaagagacacagcagtgaggtgggaggcacatgttgaaaaagtcttgactcttccacctgaagacttcatccttatgacagccttgacaatgagcaagtaggaaatgagtatgaccaaggcattagccaaaattacaaaattcccaaagaagacaatgataatctcagcatttgttgtatcactacaagccagcttcagcaggggtggaaggtcacaaaagaagaaattgatctgattattcttacagaaggagagggagaaggtacatgtggtacgcaggatggccccagacactccacagacataggctcccactaccaaactccaacatcttcttgggctcatagccacagtgtagagcagtgggttgctaatggcaacatagcgatcataggccatcacagagagtaggaaacactctgtccctgcacaaatggtgaagaagaagaactgggtagcacagtgaccataggagatgattgttttgcctggagccagtgtggccaggatctgaggggtgatgactgatgtgtagcaggcatccaacacagagaggtggctcaggaagaagtacattggtgtgtgaagttgaacatctacctggatgagaaggacaatgcccatgttccccaggatggtgacaatatagaagctaagaaataccagaaagaggggcagctcccatttggggtggtcaggaaagcccattagaatgaattcagttactgtggtgagattattcttggccatggattcaatgttgacactttgtttgtcagaaggtaagagtgaattgttaaaaaaaaaaaaaaaaaacagaactgaaggatattctttttctttgtgatgaaagttaagtttgtaatctcttgatatttacaaagcttattttcagaagtactggaccttaattttatagaacagatttttgtctttaaaacttccctttctgatcaatttttgtgtaaatttgaatttttctgtaaagataagaggcacatgcttctcaggtttgaaaaagaccaagacagctattagatgaacttctggtttacatatgaacctccaactaccaacaattcaacatattatttctctttggacatggattctgttacttcttagaatttgtggactgaccttagttttggctctctagacaattataacagcttaacaatcttttctataatccttcctgaagcatggaaataaagagcttgctctttgtgatgactaatcccttatagcagacattcataaatttttcttataatttgactactcagcaagacaaaatgttccattcagatagtactaataactaaaagttatttttcattttacctcagtctttactactccagatcagaaggcatcatctttaatatattacttcattttttcagtatttgttacatcataattactaatacattcaaaattgtagtcatatgatcttttacttcaggttctttggtaaagttatctaactcctttctgcctcaattctttttgatggtaacttacttagcatacaaaacaattggttttattattgaatacatatgtcatatatatgtgtatatatgtatatgcatgtcatggtattttcttattttcatgctccccctacacttcccatgtttttcttttctctttattcattcaaatcttcaaatagtctctatccatcctttcatggcagcacctccccacacacacttttagagttttcatattcaagaaaatacatttgtcttttaccacattgtttcttccttccccatatctcctatctactctcccattgtctgtctgtctgcctgcctgtatctatctatctatctatctatctatctatctatctatctatctatctatctatctaaatctaagcaactgggcttggttttattttccctaacatgacaaaagcacacttttatcattaaggtatttagaatattaaaaaagtattatgcctataaatagtgaagaacagttcccccaacataaaatgaggtaaataatgtaagccttttgccagcattatcatcaactttatctagcatagtatattcatttcaatttatgtatctattttcccctgtgtatacacacatatatcttgtcaataattgacaaatctgtgctctccctaaatacaataaggaaattcttcccaattcttttattttatgccccattaaatttttagatcattttacaccatttatgtgatggtacttactaatgtaggtaaatattttatactttgactatgggcttggtaactggtgtttctgtcatatgattgcatatatgccttctgccaaagacaaaattgtataattggaggtataggggaggatttgtcactaaaattctgttgcttctagaagaatctttcaaacattaggtaagatataatgttcttttcctgttctgtactgcttgctcaaagagcttatgtatgctttctatttgttgagtcatggcagtttttgcattcctaaaattccttgttgccacatggcccaaatctgacttgtatcatcacatttatctgttctttgttgaccattttcctacactatccaggactgtcatgaaagtacctaatattcaagtggccataggaagctttttttaaggaaaccaaagcacttatactttatttcttgaaagacattgttatgattcaccttctacttttaatactttatagattcttcactataactttactggacaggtgtatagtcatagatttggatgaaaattataaccaggtatgttaaattacctttcctttactcacgaagaatctataatctgcagccaatacctctactttctctaccctagtctgcttcatttgaaccatttgatcagtgtcctcattccacaccaactacttcaggttcaagatttctaacttggagtccttgaatgtaaaaccaagtctataattacccaaagttatacaaattagatcatttaaaccattggtagatctgagactagcagcaggtccttcagacttgagagggtccccaatttatttccctgtttcaccacaaaaataaatttcaatggagcctgtacaactctaaaatcatgatgttcttattaattacaatacttgaagaacacatggtacagacttttaatgaaagcttggtgggagctgtttttaaattcagagcccctttgagctctgatcatcggtttctaaaggagggcaaccctgccacatcacatttgacatggcttcctgggatatttccttcactcctcttcagtaacagaggccagggattagccagtttctttgtaagaccctcttggtattgtttaggcttcatgttgtggtctctaggtaccaactcactaagtaaaccttagaagtctactttccctccttaggttccactttccatttcttcgttgtgaattacagtagatgtagatcctattatcatttaagggatttttgtttttcccaagccatgatttctatggtgaggaataatggctcttgaaaagattttctcattatttacatgtcaaaacttgcacacttgtcagttaataattactgaatttagaaagcacacaggcattatctataataatttatagccatttaaacatgatattgttggactttacatccaaattaaatgcctttctacttcctaataacagtcatccctgatcaaggcaaggtttgtctttattttactgaatattttctttgctttgtatcatactctgactccggcccttattctgataggtatcaattttgctttattcaagagatatgtccctccacgaacatttcttttatatttacttagaagataacatatatttaaaaggttagttgggttagttacttgtgattttattacagtcttccttgctatgcttatggaacatttgacttatccatattgctaaagatgtattctttgaatgttttcattttaagcagttatgtatttcactaagaggaagttaaatctctgtgtgtctaagattatccagcagaggtccaagtgggttggtataaattctgcctcttttgctatgaatttgtttcattctctctatgtaccttgtagcatctttatgattttgtaaatttcaccgaatttaaacatatgtttttacattttcaaaaaagaaaaaggcaaatatcaatacccttgtcagcatctattatgaaattgtcaaagtctattttctgttttgtggctgaactttgttgtccctgtgatagacagacaggtactcaaagttcctgagtagagatttggtcaaagcagattgaatgccagtgcagcccctctgggattgtgcccccttaccataccaggtatacctcttgttattaagcaaataactcctatgggagaagattatcaaagttgatattaggctttcctgtagaacatgttttcatttcttctgtcttgttttctttgtcatttttgttaaaattgttcatctagtaagaacctcaattttttttgaaaaaaaatcaaatgagaacacaataatgaccaacccccctcagaacttttacataaaataatagcatttgcttatttcataacacaactcctaaggtattttacagaaggaaagcattccaagtcaggctgatgaaagctagtttcatacaatgttataacggaagaactgttacatactgtcaccccaaattaagcccagagtagggggatgcaacatattgctaaaccccagacagctttaaaaggggaaagaaaagttttatggctaattagcatttcaggacagaacacttttgggcttattatgtctgtaatatgcatcacagaaaactttgtgatctctggggagatagggaaaccaaagtctattatcaaagaactcttcagggaatgattgactcccacatttttttaaaaattattttgacttacaaccctctctcaatttctttctctttattccatatgttgtgtttctttagggacaatggaaatgttcaacagtgttaatgttctcaccttgctggaattgatatctcaaaatttaattatttatgtactaagatcttgctttgtaagaagatgctaaacacaacaaaagtattatttcaacttcacaacaaaattaaacttgcaacacctgtccttattttaaagaagccaaaccttagaaatgttaaatgtcttgcttgagatttcactggtaaaaataaatgatatttacaggatacaaatcaccgactgcagttgaactaatataccatgttgttttcccagagttgttagttgtttattgatcacctgttttttataatatgataaattctgcataaattgccttatacaatccatataactctactgaagagttttattttgatggaagagactaagactcggactagttcagtaactcatctaaggtcatattattagtcactaaaaaatctggagtttcagccatgtcaatttcattataaagacagctatactgtacatgggcaatttcctttccagtataaatatagttggcaatttatgggggattttttgggtaagctctatagtctagaataagttttcattcccatgaaagaatatttcctaaaggttactgagtgacaaataagaaccccacagaaaatgaaaataatgctggatgtttcaaccaaagtcaaacagtcttacctatgtatcccaaataagacttgaattttccagacagaccatggtgttatgtgatggtaaattccaatggaaaagggcaaatttttggtacatttactttcccttttgtgtagatcttactttggagccagtatcttcataggatttccaaaggtgaggtaattatgttgtaagtacctggtggaatagtccatctgaattcattgagtttgaaattaaaccagtaaatttttgtttaagcattttatagaaagcaggtaagttgcacagatgtccagcataactcatgtattttttcttacatgacaatgtgcctggtatataaaatgcactgtgacacggttctgtgggaataatgcagtgcaaaagatttccctggaccacaattcagctccagggacatcacaagactcctgggaaaagccagttcttcagagagaacatacttcagaagagacaagactcattatctcatctgctttatacatcttaatgtatgaaagaaaacactttgggattgcatggctgctcctaatctgttcactctcagaactcaatagctgttcctatatagagtgaacttgtttttactaagtgaccatcatattctgtctgaagttagtcagggataatagtagaactgtaactcagatctggggatttttggagaagtttttttttttttctcttttatatgcttccttagtcctggtgtgggttttagaccctgaaactcactttcattgtcttctcagaattcctcatgtaagtggggttattgactctgagggcaatacgtctgagatattgtctgaatgaacacacttcacttacttccgcatctagtgacttattaactcattttcctttatgatcacttccagagtttctatgctaaccttgctttattgcagtttttatatgatctccatctctgaaatttataatctccttgttagaacattaaaactggaatttctgagtttctttgtacagtggggagtggttatccaatgcagatactcacatctggtgaaaataaggagagtaagtaccagaggattgctcagccacaaatggggcattcatcacatccttccccaaaggatagaatctactgtttaagaagggataggtacaatgtaagaaccaaaggttagggagaactgtaggaaaacatggttttctgggtaggacagggccactgcactcatgaactctcagcagctagaatggcctgaaaaattcctgcacaagattaagccagtcaacattcaaatatggagtgtgaagaggttcatgagccctaactttgctgtaagaagataccaggactaaggtaacttataaaataaagcatttaattggggattgtttactgtttctaaaaagggtgagtccatgagcatcatggcagagaacatggtgacaggccatcaggcatggttctggagtagtatctaagaatttatatatgacccacaagcaggaaacatagaggagagaatctgtgcctggtatggtccttggaaatctcacacactacccctagtgaaacacatccttaacaaggtcatatctcctaattcttttttttttttttgatgaaagtagcacagttatttttaaactctcattccttactttaaaacatttgtttaatttagaaacaatcttatttcatatatcaattccagtttcccctccctcccatcatcccatgtccctaccgacacccccatcccctgcccagggagggtatgccttccatgggggaagcatcaaaatgtgttacatcatatgtgggaaggcctgggccctcctctgtgtatctgggctgagacagcatcccctccatggggaatgggctcccaaagtccatgtgtgcactagggataaatactgtttccactatcagagatcccatagactgttttggcctcctaactggcaaccacattcagagggtttggttcagtccaatgctggttcccctgagctctcacttgctcaggtcagctgtttctgtgggttcctccagcacagtcttgacccctttgctcattcctcctccctctctacaactggattccaggagtatgggtcagtgctgagctgtgggtttctgtttcagcttccatcagctccaggatgaaggatctagaatggcatttaacgtagtcatcaatctcgttataggggaagggcatcaaaagttgcctctccactactgcttagattcttagttgaggtcatctttgtggatctctgaatatttccctagtgccagatttctctttaattaaggtatctctcttcttgctcttctctattcctcccctgactcagtcttcctgattccttttgtttgttcctcctcctcttcccccttctctttttccttcctccctcccctttgcccccacccctgtgctcccaatttgttcaggagttcttgtccctttcctcttctttgtgggaccatgtatttctcttttagggtccttcttgtttcctagtttctctggtggtgtggattgtaggctggtagtacttagctctatgtctaaaatccatatgagtgagtacataccatgcttgtctttctgtgactgggttgcctcactcaggagagtttcttttagttacatccatttgcctgggaattttaagatttcattgattttttcccctgagtaatactctactgtgtaaatgtaccacatattttttctatccaacttttggttgagggacatctaggttgcttccaggttctggctattacaaaaaatatgatatgaacatcgttgaacagatgtccttgttgtatgaatgtgcctcctttggataaatgcccaagagtggaattgctggatcttgaggtagactgattctcattttcctgagaaactgtcatactgatttccaaagtggccacacaagtttgtactcccaccagcaatggaggagtgtacccctttctccatatcctctccagcatacactgtcattggtgttttttattttagccattctgacagatgtaaaatggtatcttagagttgtgttgatttgcatttacctgatggctaaggatattgagcactttcttaagtgtctttcagccatttcagattcctctattgagaattctctgtttagttctgtactcccactttttaattgggttgcttgctatttttgtgactagcttctttagttatttgtatattttggagattagccctctgtcagatgtggggttggtgaaatttttttcctattctgtgggctgctgctttttcttgatgattgtgtcctttgccttaaagaagcttctcagtttcaggaagtcccatttattaactgtcaatcccagtgtctgtgctactggagttatgttcatgaagtaatctcttgtaccaatttgttcaagggtacctctaactttctctcctgaggttcattctgaacctcttagaagaatttgtaaaagtcagtgatcctgtaattatttattgatgtactgaattcttttattctaactttacacaaactagaatcctttgggaaaggaacgctgtaaaaggcaaagcttccaatggtaggaatgagacaccaagcagccacacaacctttaacttaaaatctgtcctgcctgcgagatgtgctggcatataggtgatgtagaacttgtgggagtggccaaccaatgtcttgtccatcttgaggcccacataataagagagagttcatgcctgccactgcctggatggccaggaaccagaaactggacagtttagagacctagaatggaaccaaaccatatatttaaaaaatcaatgaattggttcctaaagatattgtagcatattcatagcttggtgcctagcccaattattatcagacaggcatcatccagaaactaatgggaacagatgcagaaacctactgacaaacattaggtacaacttagggaaccctaaggaaaaggaggaggagggattataggaactagaagagttgaggattgttagcattctggcatctgtactggcctgcctttgagcttctgacaggatatgccttcagctgcagccactaagagcacctgctatgaaactcactatgttccctgttaaaagggcactgccctgttacgataaatctttttgccaaaagccgcctgagccccaccgccacgttcgagctttacgccagccgcccgcccgagttaggcccaaatgaatacacagagagacttgtattagttacaaagctgcttggccaatgactaggattctcatttgttagctcagtctcaattaccatacatctatatattttatgggacttatcttatcggacgccttattggcatccctccttgctggtgaatcacatcgtgccgctggagcaggagttgaggggaaaaagagcgacacttcctttttcctcttcttaaatatgagtttccttgctatgtcacttcctgtctgcaacaccacttctctactacatttcccagaatccttttgactcctagtccagcctaacctgctgtctcattggccaagcatgtactttatttataaacatatacagaagtatttccccatcacagcccaactccttccttccatcctcctttcttctttctgtctgttatctcttgctcacttggcttctttgcctgtctctctatatcccttgcccccatcttcttttttctctttggtctctcctattcccaggggccatctctccccccattttctattccctttacctaatttaaaaaaccctccatgtgagttctgtcacatggcttttttctcgtgttgctttttaaatgacaacattggttccctgaccagaaaatgaattcctctcattccccactgcccacaggcagtttgaggcatgctggggttctggaacccagttcacataggacagcatcacttttccagatctctggatccctccatccaaaaccagcatgattggtgacccactccccctttcccatctctggctatttccagtgtgaggatttgtcccttaagtgtgggttttttgccttttgacctcattaatccctggttccaggcaaccatggctcttttgagttcagatcccttgtcccctctctttgtgtgatgatccactggggtgccctgtgcctgtgatggacccttggatccttcagcctattgtttgatgaatcactgggcagcttgggccttgcttgataaaaagccattggatcccattcagcctcactcattggtattaagctcaccaaaaatctgcttcccagcactttataacttgatattttatgggaactttgcaacattctgccagtgatcctgatagatggaaggaagtatcaccctttcattcttctgctgttctattccctcactaaacctaattaaattacaaatttaattacattaactcttttgcatgtggcatgcatgtgtttcctttgtggcagagacctccgaaaagcagtaacttcacactgggaccatatccaccaattctaccctcaatagatccactctgttccgcctgcaacaaatctgctttctcattcactggcagcttcaccttccattcaatatttgcaattgggtctctgacaggactacccacctctgagcattcccctgactgtgagacttcatttctcaagcacagtcttctccttttggcttttctcaaagtcctggtactagtcacctgtgtctctctagggctcagagcccttggctgctgctctgtgtttaatgaatcactaatcagcctgtgctctctattaaacaaccttctatgaattcctgtgatgctagggattacatacccttcaatcttacttctctgccttgctcttgggagctatgtcattatctatacctcattgttcccattggaggggggttggagacacactgaccattcccaatcagccattgttgcaggactaccagctgttggtcacagagctagaggcacaagactaccaaacatgtctgggtgattctgtggcgatgggaaaggatcaggtgctttaacccctagggagtcaacttgattccaccacaaagaacatttttttccagttgcaggtggtgtctgacaattccacagtgcctgggcagtgaagtgaaatggccagctactccaggatgtggtcagcaccccagctttcccaggtctcccaaagatgaacaggtcatcaggaaatagtcttgagaacatggtctccttatccccacctcacttgctacccctttctaatacctcacccttttataataaaaagggagaaatgttagtattcaggcacctattagggcttgccattagagttctgataggatacaccctcagttgcagctactaggagcacctcctgtgcacatttactaagttcccttttaaaggggccctgccacatcccatctttctgtctgtctgtctgtctgtctgtctgtctgtctgtctgtccctttcttgctctctctctctctctctctctttctctctctccttctctgcctatctccccaatctctgcccctcttttctgctactcttattcccagaggctactatctcccctccactccccctccataattgaacaagaaagaaaattgcccataacccaagaggatgccacttgcttcaatagagatcacaccagtgaccagaaccccaggtaagacctctgccaggaattactctccacttcctcaaaacacaatcaccagagcccagctattcttctacaaaaaatgctgaatattccaacacagctgaagcacaagaaaacaaactaaaaataaactttaggaagatagaagtccttaagttagaaatcaataaatccattcaacaaatcaatgaaaagacaaacaattggaagaaatgaataaatcccttatagaaaaccaacaataaataaacagataatggaaatgaataaagctggtcatgacctgaaaatggaaataaaagtaaaaagaaaaagaaaaaaacgaacagagggaattatggaaatgaaaactgtagaaaagtgagcttatgcaagcatcaccagaagaatacaagagatggaaaaggaatctcagtctttgaagatatcataagctaaattgatatatcaatcaaagaaaatataaaatataaaaattcctgacacaaaacatgcagaaaatctgagacactaagagaagactaaatccaataattataaggatagagtagaagaatccaagtcaaaggcctagaaaatattttagacaaaatcattaaagaaaagtttcctaaattaatgtaagacatgtctataaagcacaagatgattacagaataccaaataggttgcatcagaaaagcaagtacccccatcacataataataaaaatgctaaacatacataacaaagaaagaatattaaaaactgcaaggtaaaaagaccaggtaagatataatggcagaccttttcaagctatatccaacttttcagtgaagacactaagagacagaagggcctgaacagatgtcatttagactttacatgaccacagactaataaatctagaaaatcttttaatcactcactataaatggagaaaacaagatattctatgataatgaaaaatttaaaaatatccacatatccagccgtacagaaggcaatagaaggaaaattccaacccaaagaggttaactatacccatgtaaacacaagaaacataatatcataccagcaaaaccaaaagaggaaaacatacacacacacacacacacacacacacacacacacacacacacacacacataccattacaaataccaccatcacaaccaccaccaaaattacagggattaataatcattggtcatcaatttcttccaacatcaatgaactcaattccccagtaaaaaagacgaagactaacagaacatatgtgaaagcaggatccatctttctgttgcatagaagaaccacacctcagtgtaaagggatatcaaaaagttttttaagcaaatggacctaaaaaaacaagctagtgcttccattctaatatctaagaaaatagacttcaaaccaaagttaatcaaaattgatcgggaaggacacttcctattcatcaaaagaaatatccaccaagattatctttcattgattgatattgatgccccaaatgcagggcactcacttttgaaaggaaacagagctaatgcttaaatcataatcaaccctcacagattgatagtgggagacttcaataccccactatcatcaatgtacaggtcatccagccaaaaactaaacaaagaaatgctggagctaaaagatattgtaaaccaaatgtacctaacatatttacagaatattttatccaaacacaaaagaatatcccttcttctgggtgtttcatggaacatttttcaatgttgaccacctcctttgtctcaaatcaagtcttaaaagatgaaaagaaattgaaataatgccctgaaccctatcaggccaccacggatcaaagcagcatttcaacaacaacagaatacacagaaagacaaacaaataaacaaaaagaaactcatggaaacttaacaattctctactggatgactactggttcaaggttgaaataaagaaacttaagactttctaaaattcaatgaaaatgaatgtacaacactccacacttgtgtggcacaatgaaatcattgctaaatggaaaggtcatagcactaagtgcctacttaaagaaattggagagatctcatactggtaatttaacacacagctctagagcaaaaagaagcaagcttacccaagaggaatagattacaggaaacaatcaaactcaaggctgaaatcaataaaataaaaacaaagagaatacaaagaatcaatgatacaaagagtaagttccttaagaaaataaacaagagagtcaaacctttatccaaactaaaagttagagagaatatccaaattaacaaaatcaaaaacaaaagagggacatgacaacagtcatcaaggaaaaccaaataatcattaggtcatgatttaaaatcctgtattccacaaaattggaaaatctataatgaaggagaaggcttgtagagtcaagatacctttattcagataaataccagccaaatacaagccagaacgtgcccagaggcaggaaggcagggaggccagagagaaggggccgccatgtgtctgccatcacttaagaatctaacatgcttcatcctgagctcacgttgaccaatccctgacaggcatggtcaagcacacctgtagccagcccttaggaggcatggttacggtgtctccttacaattccccttctagtctaaaagaggattaaaacttaatagtgtaaaatatccaaaattaacaatcataaaggtgaaatacaagaagatacaataatctgctattgtaattctaactatgtctatttcagctaagccctaaagtcatctgaaaggggtgtccaacttgaacaactccttcctattccaaccataaacaataggaaagttattcctaactaggcttacattaccctaatagacaataatggggaatgggggcatagcatcctccacattacttcctgctgaaatgggatgatggtagccttgtggggtcctttgggaacaaaatgttagtatagtgaaagtctctaatgggttctatccagtctatgttagatgggatttgcttgattgaagatctaggttgaaatgctcaacttgattgaagtcaatatttgaagctgtggccgctgtgtcaggtgaaacggaataagttggatccggtgcattcgaggaggtatggcccaatttctttcaggtgtctccctacatgataagaaatggataatttttcctgtatatacaacttaccaaagttaaatcaagataagtaagtaaatagacccacaacacctatagacttcagtcgttgaagtttcctgaccagaaggaggagatagagggccagatagttttaacacggaattttacagtactttcaaggcagagcaaatgccataaaataggaatggaaggaacattgccaaattcattatgaggtcatattcattatacataaaccacacaaaaattcaacaaagagatttataaaacaaatttcttcatgaatatagagtaaaaatattcaataaaatacctgcaaaccaaatctaagaacaggaagcagtctcctacaccaattaattcaagggtatttcccactttgtcttctaataggttcagtgtggctggattatgttgcggtctttgatccatttggactgaagttttgtgcatggtgatagacatggatctatctgaagtcttctacactccagcatctggctatgccagcaccatttaataaagatgctttctttattccatcgtataaatttagcttctttgtcaagggtgtaaagggtgatgattctctgatttctttctctgagaatgtatcatctgtatatagtagggctacagatttttttgagttaatcttgtatcctatcactttgctgaaggtgtttatcagctataggagttccctggtagagtttttagggtcacttatgtagactatcatatcatctgcaaatagtgaatgtttgacttcttcctttcccatttgcatcctcgtgatctccttttgttgtcttattgctctagctaggacttcaaggacaatattgaagtggtatggagagagtgggcagccttgtgttgtccctgattttagaggaattgctttgagtttctctccatttaatttgatgttagctgttgacttgctgtatattgcttttattatgttaaggtttgttcctgttattcctgatctctccaagacctttgtcaagaaggggtgtaggattttgtcaaaggctttttcggcatctaatgagatgatcatgtaggtttttccctcagtctgtttatatggtggattacattgatggattttcatatattgaaccatccttgaatccctgggataaagcctacttgaacatggtggataatttctctgatatgttcttggatttgatttgccagtattttattgagtatttttgcatcaatgttcatgactgatattggtctgtagttctctttcttagttgtgtctttgtgtgggttgggtatcaaggttattgaagcctcctaaagagagtttggtaatgacccttctgcttctattgtatggaatacattgaggagaataggtgactacttcctgaacattataccagtagcacagacactgagatcaacaattgataaatgggacctcctgaaactgagaggcttctgtaaggctaagaacacagtcagttagacaaaacggcagcccacagactgggaaaagatattcaccaacccctcatctgacagagggatgatctccaaaatacacaaagatctcaggaagcaagtcaccaaaacaccaaacattccaattaaaaagtgggttacagaactaaatagacaattctcaatagaggaatgtaaaatggctgaaagatacataagaaagtgatcaacatccttagccatcagggaaatgcaaatcaaaacaactctgagataccattttacttctgttagaatggctaaaataaaaaacaccaatgatagtttatgctggagaggatgtgaagaaaggggaacactcctccattgctggtgggagtaccaacttgtacagacactttgcaaatcagtatggtgactcctcagcaaaataggattcagtctaccacaaatcccagcaattccactcttaggcatacccccaaagaagcacattcatacaacaaggacatctgttcaatgatgttcataacagcactatttataatagccagaacctggcaggaaccttgatgagcctcaactgaagaatggatagagaaaatgtggtacatttacacaatggagtactgctcagcagaaaaaaaaacacaatggaatcttgaaattttcaggaaatggatagaactagaagaaaccattctgagtgaggtatcccattcacaaaaagacaaatgtggtatgtactcactcatatttggattttagacatagagtaaagtattaccagtctacaatccacactgccagagaagctagtaaataaggagtatcctaagagagacatacatgttccattagagaaggggaaagggacaagatctcctgagcaatttgtgagcaaggaaggaggcgggagagagctaggagaatgagaaggagagacgaggaggggtgaggaggacatgagggagcagaaagtttgagttgggggcagaatagaagaaaacaagaaaggagataccataatagacggagacatttatgtgtacagagaaatcaggcactagggaaaaggcttgagatctacaatgacaccaacttacaatctaagcaacagaggagaggctaacttaaatgccctcccctgctagtgagattgatgactgacttatatgccaccagatagccctcattcagtagctggtggaaatagaagcagatacccacatctaatcattgaactgaactggaatccagttgcagagaagaatgagtgatgggtaaaggggtccagaccaggatggaccaacaaaaacagctgacctgaataagggggagctcttggtccccagactgatacttgggaaaccagcatgggactgatctagaccccaggaatgtgggtttcagtgagacctaaaaaatctacagtacctcctgtagtagttcaatacttaaccttagcataggtgttgacttcaggagcccaatccacatagagggatactccgttagccacaaaacatgggagtgggcccaggccctacatcaaaggatatgatagactatgatggccccctatggaaggtctcaccctcccttgggagcagaaaggataggtgataggtagggatttagttgtgggagagtggtagggaaggagggaatggagagggaactgggagtgacatgtaaaacaatcttgtttctaattcaaataaaaaatatctcagctgtaggagttccctgatagagtttttcgggtcactaatgtagactatcatatcgtctgcaaatagggagagtttgacttcttcctttctgatttgtattcccttgatctccttttgttgtctcattgctctagctaggacttcaaggacaatattaaagaggtatggaaagagtggacagccttgtcttgtccccgattttagaggaattggatcaagtttctctccatttaatttgatgttggctgtttgtttgctgtatattgcttttattatattgaggtatagtcctgttatccctgatttatccaagacctttagacactgaggtcaacaattgataaataggatctcctgaaactgagaagcttctgtaaggcaaaggagacagtcaacaagacaaaacagcagcccacagactgggaaaagatattcacctaccccacatctgacatagggctgatatccaaaatatacaaagaactcaagaagctagtctccaaaacaccaaacaacccaattaaaaagtggggtacagaactaaatagacaattctcaatagaggaatctaaaatggctgaaagacacataaaaaagtgttcaacattcttagccgtcagggaaatgcaaatcaaaacatctctgagataccatcttactcctgtcagaatggcccaaatcaaaaacaccaatgacagttcatgttgtagaggatgtggagaaaggggaacacttctccacttctagtgggagtgctaacttgtacagccactttgaaaatcagtatggcaactcctcaagaaaatgggaatgagtctaccacaagatccagcaattccactcctaggcatataccccaaaagaagcacattcatataacaaggacatattttcaaccatgtacatagcagcattatttgtaatagccagaaactggaagcagcctagatgcccctcaaccgaagaatggatagagaaaatgtggtacatttacacaatggagtactactcagcaaaaaaaaaaataatggaatcttgaaatttgcaggaaaatggatggaactggaagaaaccattctgagcgagataacccaatcacaaatagacaaacatgatatgtactcactcttatgtggtcctgctttatgatacatagttgtgactatgctttatcagagctgtttttaatgatgttgcttagaatggtttcctcccagatgatgactgagaagctaattaaaaaaaaatggtgccaagtaccacaagagtaacagaactgcgctgttttctgggatcttgttttttacttttttgttgttgttgtttgttttttgtttttgtttttgttttttgttttttgctttttaaatggagtgtgttggatgtctctacaattttgttcaaatgactactgaaccatatatatatatatatatatatatatatatatatatgctaattgaaactcaaatatgtgatgaatccaaggtgtttcagagagtgctcacctgtgcatgcaaatttgatttcatctttagtaagtagtaaagttatatgcttgccaaaaaaaaataaaaaaataagtgacacactggaagacaaatgtcacacaatttcaattttatgtgtaacctagaaaatgatgaacttaaggaaacagagagcagtattgtggctattaggcttcaatgtgggtttttaacaatggggaaacgattggtttaaggctataaaactacagttggacaagaggcatgaactctctgaagtcttgaggtccactgagagcatgataaatatggttgataacaatatgccatattttaaaagttgtgagttagtatattttaagtgttcttaaaacaaaaatgatatgtgtgatataacatgttaattggtttaatttagccatgccattgtgaacatattgtattgtgtatcataattgtgcatgactttatttatgagctaaataaatgaatgaaaaaaaagaaggaactttgagagcccatcccacgtgaagggatgctctcatccaggacacatgggagagggcctaggcctggtccaggatgatgttgtggaatttggggagcccccatggagggctctaccctctatgtggagtggaggtcagaaggggatggttgggaattagggggaggggggagagggagaagcgattgacatgtgaaattataatttgcaaaaattaaataaaaaatttaaaaaacatctcaaaaaaatctaagaccaaaccacaaagttcaatctactctgatcaagtggacttcatcccagagatgcagagatggtttagtatatgaaaatcagccaatgtaatttaatatataaacaaactgagagaaaaacccacatgattatcacattagatgttggaaaagtctttcacaaaacacatgataaaagttttagtgatacccttcatgataaaagttttagtgagattatgaacaaaagtgacatagcttatagcatcaaattaactagagagaaactcaatgtaattccactaaattctggaacaagacaaggctgtccactctttacacatctattcaatgtaattcttgacattttatgtggaacaataaaataactgaaggatatcaaggaaatacaaattgggaaagagtgagtccaatatcttatttgcagatgatagtatacaatatataaacgatgccaaaaattctaccaggtaactcctacagctgataaagagctttaataatgtggctagatataagattaattcacaaaaatcagtatctctcctatatacaaatggctgaaaaacatcagggaaacaacatcccttactatagtcacaagtaatttaaaatcaatatattatattggggtaactctaaccaaacaaatgaaagacttgtatgacaaaaacttcaagtctgatgaaagaaatggaagaagatatcagaagacagaaagatctcctatgctcatgcttcagtaggatttacatagtaaaagtggtcatcttactaaaagcaaatctacagatccaatgcaacccctatcaaatttccaacacaagttttatagacattaaaatgataataacaaaaacaaggaaaacttaagcaattctgtacaataaaacaatttctggaggtattaccattctttatttcaagctgtattagaaatcaataataatgaaaacatcatggtactggcataaaatcagaaaggtggatcaatggaattgaatggaagatccacatttaagtccacacacacggacatcttattttttataaaggagccagaaatgcacactagaaaaaagaaagcatcttcaacaaatgatactggactacctggatgtcagcatgaagatgaatacaaatagatccatatctatcaccctgcactaaacttaagtctaagtggaagtgaatcaaaaccttcaatataaaacctgacacactgaatccaatagtaaagaaagttggtataggctttagcacgttggcacaagagacaattccatgaacccttgtagtgtaggcaataagaccaacaaccaataaatgtggcctcaggaggacagaaaagcttctgtaaggcaaaggacaccatcaattatcagcataaataatgggaaaagattatcaccaactccacattagataaagggctaatatgcaaaatgctataaagtagtcaagaaactagacttcaaaaaaccaaataatacaatttaaaaatggagtatagttataaacagaaaattctcaagggaggagtatcaaatcgctgagaaactcttataaaaatattcaacatccttagccacaagggaaatgtaaatcaaaataactttgagattctatcttatacatgtcagaagggctaagatcaataacacaattgacagctcatgctggccaggatgtggaggctgttggtatgagtatgaacatatataaccactatggaaatcaatatagatgttactcagataattgggaattgatctacctcaagatccagatatacttctcttgggcatatacccataggatgatccatcatagcacaagtacactctattacctatcttttctcatactggaaacctagccaactactgagtgctagtgaagctatggatcatggaggagaccctacaatcactaatttactagagtggcataattcctaacaaaaatgcaatatttgctcttaaacctacagataagtgttgttctcagacctaatcaaggaaacctctatttgcaacagacataaatcattatgggaaaacatgtatcaataaaaatgtagaattgtggaacccagttccaatgaatatatttatcaaatattcctgctattaaggctcagtaaacattttgggagagtggacagaaatattgtatgagccacaggaccaaagagttttctgggagattgtgaccactaataaagtcagatgctacacccatgaagacttacaaacatgacttcctaaataatagctgaatgacgacaccaatagacatgttaaagttggtgggggaaaagtccatgaagtctcaaccctaaataacataataaggaatggtgagagcagaaaaatattccctttcagaaaattacataccagttgggtgtctaataaagatgatcagccctgaaaacatacatacaagtgacattataaagattaatcaggttatattttagaatatatatatatatatatatatatatatataatatatatatgtgtatgtgtgtgtgtgtgtgtgtgtgtgtgtgtgtgtgtgtgtgtgtgtacaataaaggaaaagagaggccatgcatttgcatgcatttgaaagtgagtaaagataggtaagtgggaggattttgaaaaaggaaagaatggagagatattatataattttattataatctcagaaatataacaaaaattaaaagctcatacatgaatgataaataaataaataaacaaagtcttttcctcccaagttgtttttggttatggtatttcaccacagcattaaaaacccaaattaagaccaattaccgttcttcattctatcttgttttgaagacttcattatcaatccttggagtaagtattgcatagttattgttgttctttttataacatttgcatcaattttagggaagagctccatcttagattgggttcctttaaaaatcagctgggacagagcttggggtgtttttttttccatgaagtcatcttcacaaagtaaatatacaagagaggaaatgaaacagaaaacagctaagcaaggcatctggagtacagtgtggtagagaagatagatattcctacataggaagctggtgaatgtcctttgagacaacagatcatgaaatcagatcttcacaggtgttcaaaactggaacacatccttagaagtcatatcttggaagcatccctgtgggaaaccatcctaaaggaagaagatgttttcctttagggaggtttgcatcttctttggcaggagtaagatatatctaaagaagagatatgcaaataaattttggggaatataaatgttcttcattcattataagaatgagaaataaatgttaatgaatatttcaagttactcatgttataattcctaatctgacatatatatatatatatatatatatatatatatatataatatattaacattcaacatatacatgcacacatgcacacacgcacacacgcacacacacacacacacacacacacacacacacacacacacacacggagagacacatatatgtatatccttgggattcctcaggggactgagtctaggtcctactccacatatgcttcatttacatttgtgggatgcatagtatttggatatttgcatatagcctatatacataatcctgtatactctaaattatcactagaaaacataatattttatataattttatataatatatatattatatgacaagaagatgtcatatagcatttttcaaaaataatgacacgaaatacctgaactgtatttattctgtaaaaatgtaacttttctcaaatactttctgtcccaagtttgttgaatctatgaatatgggtcctgtggatatgaatggcatctctacaatctaatatatagttatatagtagtgtgattgtgtgtccataaaatatatagaaactaaaaaacaaagctatatattatattggaatattggaccatctcagcagagttactttctaatggttgcattttcctacaattcatttcaatggagcagcttgaaatattacagggacttcaatctcaatttaaaaatacaaatttctatatctgtaagcatgttgataataccagaccccgttttgagtgttttgtaagtatcatcaggtttaacttctataatcactctaggggaatgattgagaaatgataaactcaattaaattcacaatgtagcaggaggatttcaatccataaaatctactgtcaacgtaaatgagctaaagaagtatatttttgccttctttccttagacagttgacaatgctttttagaatggggttattactattgtgacttaacttctttcctttatattcttaacattattgaattttcccatattaaataaatttcactcatttaacaaaaaataccaggaagttattgcttagtagttacaggcatcaagcccaagtcccatggttccaatctcagatgttctttttgggaaaggatttctttcatgggaatgagtgagttgcttgcatgcatgtatgtgcaccatgtgtatgcagtacccttggaggccagaaacaatgtgggttctgggtcttctggaagaacagccagtactcaaaaatgctgtatagctcctgaccccttcagttcttctttttattaagactgagtgttttatcactctacctttcacattatttgttgtagattataatagtggtaggagctggattatgagatgtttttggcagaatttactggctcaagtataaattaaattaatatggtatgtcaatactgcccctatgtatttagtatatatccaattaaaattagctaaataaatgagtaagcagtttgctagaattttccatagtcaagttattttgttgtctcataaatgagatgggccagggtaaataatttcaaattgctgacaagttctcaggaagcagaacacagaagaatctccctcttctccagaatgagactgaatcatggtggttggggcttttggataggttgaagattgagtgaagaattattaagaatgataatataggggatatttttctgaaggtgtctttcctctgagagtgagagaatcctaattagaagcttagggcctgattagaaactccactcaatggcaatcccttagcctcagtcttctaattgccttgctgtgatgaacgatccaggccagcatagggcagaggtcccacacctattagcaggttttcctcatattctggggctgcagatgccatagatgcctattttctagcccctcaaagtcccagttagacaccctattcttcccacactcctatagcttcctgtatttgggaagaacttttggtctggataaaggtgagtgtagccatagctgttcagagagagagagcatgagtgaattgtaattcagatttcaaatgtactaaacaacctaagtcttcctctactttcatctaaaacaggccattctttttgtttctttgcaaagcagtgtcaaaactaagcataatcttcttgtgtctggcaggtatgcctgccacttaacatctttgtctctcatctctagctgataagtatttttatatatgctttttgttattgtttaaagtgtcaggagatctgagatcacatggtgaaattacacagaaaagtggggaggctcttcaggtatttttgttgattatatgagaaacttacacagtttaggagtatttgtacctatttagtgtgatagcctcaacattaaaaagagaagtggtgactctagataggctataaaataaaataaaggctttctttgaagaataatgtttctatccttggaaatgttggtatcccataagtgtttctagtcagagagggttgctgtcagtttagaaataggctgatagtgatgctgtttagggtttgaaatccatgtgggaggcaaattttaaatcattgcagttcattgaaacagtgctttctagacactggtcaagtgggtgctgactttgaaacaatctctgagatagataaagagtgaaggtgcccaaaactgaaccaaagacatctagtgtacattttttgttgtttggcttgtcctatatatgaattaaccgcacttctgtacatcattgtcctaatctccctagaaagaattcattgcctgctccatttattttctaagaaatagggatgttggaagcactgagcaaagactctgaaaagaggtacaggtcaagccatggaaagaatgtctagggctgagggagacctagagtatgattataccaaccattacccatggcttagtggttttaggcaagaccttcttcattgcaaagtctctgtttcctcatctccaggagaggtggtaatgtactttatctttcagaaggcaggaaggtggaacactgatctaaagatattcctttgtgtttcaatagtctcatgcacatccaatgtgaatagcaggcagggcagggtaaccaggatatgggtaaggaatagagctcagcatctgtgcaggtgtgtgctactacctctgagtatattatgcggttggaaaatgaggaagagccacagaatctcaaaatttcacatattcctgccacctttggaaggacgggcatatctctgtggctcctggtgaatagtctcagaggtctggtacatttctagaatttatttcttcctagctctcatttcctcaccagctgacatctttgtgtcttactttcttcctccaaaaatggactgtctgaggatcaggtgaggtaacaggtgtactgtgtcctaaaataaggggttttggataatttgtagttgggggaatggagggctttcctcagtgtaccacagaagtttggctgaacatgagatatatttttctcatttcatcctcactagatccccatgggttgaatagtattagggctatacaatacatcacaaagctattattcaggaaattgaagagactggctggatttgagcaagtgtaatagaccttcaaagaattctgcatccctgacaccatgctgcttttacttctattacttctagtgaaaatctgctgtcagaaagtttcttcatggttttttttttattcaactagaaatgacaaagtttttctagccagatttccgagggaaacatttaactctgtcagtgagttatatgtgtgcaaacatgtttctctctctctgtgtgtgtgtgtgtatatatatatatatatatatatatatatatatatatgtgtgtgtgtggtgtgtgtgtgtgtgtgtgtgttgtgtgtgtgtgtgtgttgtgtgtgtgtccgtccaggtgttcatgcatgtgcatacatgtataggtgggtaccatagattggtggagggtgtcttcctaaatcactctccatcttaatagttttagataaagtctttccttagggctagagttgatcatgctagagtggcttgctaacaagttccaggtttcttcttcccccaccttcaatactctgactacaggcatgtgccgttgcacttgacttgatgtggctcctggggacctacacttatgtcttaatgattgtgaggcaagtactttacccattgtgacatcttcttaaatctgcatttcttgaatagagattattttcatctgtagcttaatccatttcaggatggtgtagagaatccatttcaggatggtcatattttttttttttaccatttatgatctgaggacttacatattcaccaacacactaagaggaagccagagcatcctgcctcatgctctgttattctccttcacttttagctcagcccaggcagataatgtcaatttggtcataggaaaagggggagcgtgacagtcatctgtatcatgtgttttagttattttccagcatttccgaatgctgtcagctacaggataaatgtgcaaatctttacacatttcattgcagaattccaagctgacatcactggctacattacttcagacacatcatacaatgtttgtacctcaacgtttaaaaataattttaagtctgtgatgtagtatctaagtaggatgtgtaaatattcttcagatccatggcatatctcattgtaagtgctattctgaagctgatctcagggcatacagataatcttttacaagtgaaaatttttaaattttattttagaattatctttctaggtattttatttgtttcacagtattctcttggttctaaatccacactcttctcagttttaagtcacagaatctgttaaagtttagtggaatttctcatttctgaaatacctgctagtttcctgagggttagcaaaggttaaggagaaagcactggtaatctcacctagcaaaccattttcaactccttctttacaaattttggaataagtggaatcacatatcatagatgtgtgaacctttgtatgataaagaagaaactgtgaggcctggtgaggaggcataagggataaaacacctactgcacaaatgtgaggactagagcttaaggtggacaggcatagtggccagtggcaatcccagaactttggaggcagaggtgggatcctgagggcgaggtagctagctgacctagctatattaagtaatctctgagttcagtgagagaccctatctcaataaacaaggtggagggtgactgttgcacacattgtaagaatttctggcttccacatggacctgcacccccacatgcattcccataaacatgcatgtatgtaactatacaacatatacatgcaaaatatgagactgtgagtcttgggaaagcatggttaatattcagagaagagtaatccagttacagagatcttagggaggcccagaagtgaagtatttcttggcttggtgaacaattagttaacaaagggctgtggatggaatgtgtgtgaactttctttggatggtggagagtggtgggcttaaatggcattaagaatcactttgttctgttccctcccttctaaaaggcaattccatgtatggggttgaaaaaaaggacacagatgttccagtattctgtttgctcacctaaagttccaggacacagttttcctctgtatctacacacagccatggctcttctttctacatggagactttgttttcctcaacccaagcaattaggaagttagttggttattctgtctaaaaatatacatcattatggagtagtttaagaacttaatcagttcattgcatcaccttgtaaacatcaaggtgatggcctttacaacattttgcagttcctctgatgttcagcagtcattgagagatagtcagttcttcaaaccttctttagccattccaaaatggacacgaggatgaacatattcacaacatactcaggaatgtatgaattaggaacccctctctatagaattctttaaaaatacatttattatacttttaattgtgtgtgtgtgtgtgtgtgtgtgtgtgtgtgtgtgtgtgtgtgtgtgtgtgtgtatgtgtgatcccaaatgaggacagaagagggagtcatatccctggattcacaggcaattgttaactgcctgatgtgggtactgacaacagaactcaggtgttctgcaagagaaatgtatgctctttatcaccaagccatctctctgcccaccctgctcttcttcatggtatatcctgatatcctctgtctctgtctctaagagtagggccatgtaattgtaattttgctttaaattgcactttattcatttgtgtatttgggaagaaggggatcatgtgtcactgcatgggtagaggtcagaggacaccttgcaggatttggttctctcctttcaccatgtgggatcttggggattgaactccagttatcagacatggccgagaacatctttacctgttaaggcatcttgctggttcttcattgaaatattcagaagttgattgaagaaccaagacctagagacctccccaagcttttctactttcttcctttaatacttgcatttctaccatatgcataggtccatcagatttttttgagtcactctttgtgagttatctttacagaactcattgggcaaagtcctctggcaatatttgtattggactaatattgatagagctaattattctgattatgctgccatccagccaacagaaaatgacaatttcattcatcagtacattttccaaagatacttaaatagcttgtaaaatgcacaacatgaagcaagacaaaataaactaaaagggaagaatgagttttggcaaagagagaaagaacatctgtaggcagatattaaggacaagggcattgatgtttacttgaccttgatcttgtgattgacctggaacagaaagtcccaggtgagtgaagactctgggctgagggtttactctgtgaaataaaggagtttgttttgagagttgctctagaaatctctttgcagatagaaatgcaaaggtgttttataggaggacaagcatatgcagtattttcaactcagaattagaaatatctgctggaatttcagagtttaattaacactacttccctccttactcaagtgtgagaggttaatgtatgcatagtcactagaataatgttttgcataaaaagcacttactgcatggcaacactcagtattaccagtcttctgaagaactttatcagtgaatggaagtgtgatcctggaggctgatgggatgctactcaaatccctgcttagtggttggcttaaatcaaattatttcatcactacaaatctatgtttgtctgtttataaatagaggtaataagaaagttcactgtagtggaaataaatgaggaagttatataaaatatttgagacagtatttaccacaatgagtaatctattaatctaagccattattattgtcaatgaatgatacttaatttgatggtagagttgacatttatttggggttttaggatttgagggtatatctttctagtaaatgtgctgaagagtagatatagttttatagatagataaaagatgagcagacaggcatgatggcaggcatctgcaatcccatcattgggaaaagagacaggaaaatcaggagttcaagatcagcttggttacagcctgggatgcgtagtaggccatttctccctctcaatgaggaatgtagaaacagaagaaaattaggttggtcctttcaaagacatcttctttatgaagcaagatcaagcctttacacatcaagccatcaccccagcctcttataaatgatattttaaaaaaatcatcctttactttgagtcttaatttcccacacatggcagctaccatactgaacagaaactatgatcttttgtccaggtaaatatatatttattccctttgtaatatacacattgtgtaggtgtggtcccacctggatcttggtggataaatggatcttgcctaatttcttccaagcaactaaagaagcctggtgcatgatgagctctcagtaaaattttactgaattaatgagtgaatacaaattactttcaccttggttaggatgatttacacagagtgtcttttaaatttcatttcttaaaaatgatctatctatgtttgcatatgtgcttatttggtagttgttctttaagggtgtaagaacttgtcataactcttgaagctggagtgtcatgtatcttttggctgctggacaaatgtgctaggcattgaactgtggtcttctgcataaagtatatgtgcttctaactgctgatacttctctacaacctcttcattaacttcccagaacagaaaaaccagtgttttggaagatgatgcaaataagattttttcttaaaatacaaaaagcaaacaaagcatttatattataaaaaatcctagatgtggggcaaaccagtggataatgaccattattccactattaagtcatttttttgccaaatatcaatagaagttttacttcattatctttctaaatccatgtgatgcctttttaaattttatattttatttcatttattcaaagaggacaagtggaatgacatacaaattacacattacagtacttcagaactccaaataatgagtataggaaggaagagccaagaatgtcctgacacctagtagaacctcttctgtgtcagaattctaatcttaaggtgccagctctgtctctttatgagattttcaggctagttcttgaatgacttgattcatgtatctccttgatagataatgatatggcattaaagattgataataatctggcattaaaaagttggggcaagtcattgggggtaaaagaacttggaaaatttcatgatgtttgggaggacatggagggaagagcagccagaaaaagtgctctagaggttctaaggtcaaagggtttgtagctgggttggtgttgatctccttttatggtagaatgcagagtaccttccagtatcatgaatactagtcagcaggggttaaggctctgggtaggcaccagatagacttctctgtgttcaatgtgctacgtatgtgttgtcttcagcaatatgaacttaccatcaaattatggagaacaaccaattgccttggcaaaaacctgggttatttacgggttttccatgggtcccctttgtcccacaagtcaagatgcaatccactactggaggtttcatttgatggtgagagatgtttaagttggcccctcatttaacttgattcaatttctttcatgcatgtatatattttaagaagccttttactacactaagtttccatatgatgtcttaatggtccttagttttagctgtaccaccccatattcttttaaccttatcttttcttcccctatccatttattcctctgtttcagtccctgaccactgttcatccataactgtagcaaaaaagggacatcccatggaactggagaaaatctttgctaaccataaaggtcctagggtattcatatccagagtttataaagatccccaaatattaaacattaaaaattaagtcatcaaataaacaaaatatcaataacaaaacaggcaactctcaaaagaaaaaatacaaagagccaatagatatatgaaaaaagttcaatattcttaactaccacagaaagacaaattaaaactaaattcagattctatcttacctgaataagaatgtctatcattaggaaaataaatggcagtgaagcttggtagcattggtctacattattatttttctggagagtgagagaagaagatcaccattcaaggtcttcttaacttgcaaagtgaactcaaagtgagctatttcaaaatttaaaaaagaagtggcagtgataattaggttatagttcagtgaaagaaaactttcttagcatgcatatggtcctaggttgagttctcattaaaaacaaaattcgtcatcaacaagaaaaagcacttaaaacattcctggtgatgatctgaggaaagaaaaaaattttacactcaattggaatgtaaactggcccactcactacggaaactatcacaacagctcatcaaaacactaacactagcacggtctgaccaaactatattacttctgggtgtgtctccaaagagattcaagacagtatgatacttacacacccatctttattgctgccataatcacaataggcaaaacatggaaccagcctagatatccatcaagagattagtaaatatagaaaatatggtagatatacaaaatggtatttaaattagctataaagaacaaaatcatgccatttttaggagtactggttgaagctcatgtttagaatgattaattcacttgttcaacatctgaaggtattttaaagctataggatcccatcattgtttctgagaaacctttttctagctgaacatgaagtcaatatatagtcttaatagaggaactgcagaacgttggaagtccctgagaaactgtgagtgctcagcctcaatttgcctgtttcctaattaagaagccatgtggaatggcttagtcactttatctctttgttagtcttctgtcaaaagtgcaatttactcagcattatgtgcttcacaggatttgtagaccaagtgaaaccaagctcacaaaaatagtgtttgcaaataatgctcattaaggagaagcaagtaggttgtagtttccgtaattaatttttcagtggtatcttcttattaactgttattttatttcctcaggtgatcttagatttatggcagacaatggcagcagggtgacagaatttattctgatggggttccagcttcaggcagagctgcaactaggtctcttcttcgtatttctagctttttatctcatcacaatgggaggaaacttgggcatgatcctgctaattcagagtgatcctcggctccacacacccatgtactatttcctcagccatctgtccttcctggatatctgctactcatctgttattgtgcctcagttgctggagaccttggggactcataagatggtcatcacttatgagcgctgtgctacccagttcttctttttcaccctgtatgctagtactgagtgcttccttttggctgtaatggcctatgaccgctatgtggctgtatgtaatcccctcctctatgccatggccatgacgccacagactcgcctggggctggttgctgcagcatactctggtgcaatggtaaatactgtggtccggactgggtgtaccttttccatttccttttgtaaatctaacaaggttgacttcttcttttgtgacctcccacccctgttgaagcttgcctgtagtgagaccaagtcacgagaacaggtgatcttccttttggctttcctggttatcacaactagtatttcagtgattcttatatcgtaccttttcattatctgggctattctgaagattcgtacagcaggggccaaagccaagaccttctccacttgtgcatctcatatgattgcagtggctcttttttttggaacactcatattcatgtacttgaaaggtaacatgggtaaatcactctgggaagacaagattgtgtctgtattctatactgttgtgatacctatgctgaaccctgtgatctacagcctgaggaacaaggaggtgaaggaggctctgaagaaaactttcaaaagaatgaagatttcccaaggagtgtaatacttaagctccataagtccagaagttcctaacagtcctttgggcctttgttttattttcttaatatatgactctgctgtcatagttgcattgatatattgaagcagaaaatgaaagtttggcttccagaattgtattagctctatgattttgagcaagagattctttttatcattttatcacacacaaaatttttattgaggcttcagagatggctcagtagttgatagtgcatcttgttcatgcagcagactcaaattcagttccaagcactaacagttaccactagctacagatccataggatctcctggcctccacgggtctcctctcttcttctccctctccctgtccctgtccctctccatctggcccctctttttcacacacacacacacacacacacacacacgattacataattaaactgctatttttaagaagaaaaatttcctttttgctatgattgaaagtcaagagatctttagccaagatcaagacagactaaactaatgtcaaagaaatttataattggaaatatgttataaaatgtaagatttattttttatacatattctggatattgttgagtgttttaatcagctactttactgtttcatataaaactcatcttttaacctatgatgattacaaccaacagcatgtttcttatgtggtgaagataaactctttggttgtatggctaagtatggttaggcagatatcaacattggacaaaaaactgaactcactcataaacaatttaggtgtttttcatggaggaatagaagtacccaaacaaaagaaggaagaatggaaagaaaggatttatgattcagaaattctcatctagagtatgtttgcttactttctaagagggcataaagtcaagatgctgctgaataaagggaagaagtaatgagttatattaattattggaaacattttgatcttgatgtatgactgaaatgaatctctaacattatgctagtttttgataaccaagatttataagttctattttttctcgtcattattcatgctttaattaacccagattattttctattctttagtgatagacaccactatcttcttgaatctcctctagaacatttattttattgtcagaaaacagagaaggacaaatcaatcaccttttaatgacctccattatatgctagaaatattacttgggaatatctccatggagaattcacaatcttgtttatcatttcattaaatatatagagagtactgtgtagcagagaaaatatttgtttggaacatgattacattatagaacacatatgggttatcctggaatatcatggaatttgaaacatgggacatagtcatgtaccatgccagaccattatacagataagctttcaaagttttggaaagtggaaaagaaaaaaaattaacaaaaacaaaaatcatgggtcatttttaaatgttgaaataaggctttaacgtcatctgggtcatttttaaatgttgaaataaggctttgaaaaaaagcttccccaaagaactaacaagtaggtagagacctaaataattaagtatgctgtttttctgagattatatctgattggaataattgtgaatgcaaagttctgtgaaagcagatgaactgaagagaagccagattgagggaaacttctttattttttatgattatcaaattggatttttcattatgtttgatgataacttttttatcaagttgtattgtagtctcttattagacactggaaggtttatggcaagtaatctggatgatatttggacaaataattacaataaatcagtttactctttcaataaagtgctattaatataatccattgttctgttcagtattatatcttttaaatttttaaaataagcttttatttaactttaaacaaccttattttacatgccaatcccatttacctccacctcctatccacccatgcccctcacaaagcccccattcactgcccagggagtatgaggcctcccatgagggattatcaaagtctgacacagatctagggaatcttagtgtgaaatgcaagtggtggattcaggagaaactagggtacagagccttgcaggtttgcttacggacttgtgaattttatttcaagagcaggatataaaatgttagttctgaatttcaaaaaaaaaaaaaaaccaccaacaacaaaaaacaaaaaaccttttcctgtaattggttgggttggaaaggaggccagtggggatgaaaatggagaagcatagattaactgtgtaagaaacaactggcatattctagtgcatggtggtatatttctgtgagatacaatattgtcattctcaaattcatcctaagaaagagaaaactaggaggtgaatgactatgatctgagattaggactcattcttagaaaaaaggtaaagttgaaaaatataacttggtgctatctgcctttgcatttgtgtacaataatttatacaagttctaatctttctcttgtctataggctataccagttatcaaatggttattttctttaatcagtttcctggtctatgccaggctgtgataatgaacttaagaaactctgagataccattctacacctgtcagaatggctaaaatcaaaaacaccaatgatagtttatgctggagaggatgtggagaaaggggaacactcctccactgctggtgtgagtgtcaactcgtgtagccactttggaaatctgtataactattcctcaggaaaatgggaatgagtctaccacaagatccagcaattccactcttaggcatatacccaaaacaagcacattcatacaacaaggacatctgttcaacaatgttcatagcagcattatttgtaatagtctgagagtttgaacagaagagagcaagataagagataatataatagagggagacattatagatttcaagagaaatcaggcactagggaaatgtctggagagctacaaagattacaccaagtaacaatctaagttacagaaatgccctctcctgataatgagattgatgattaattcatatgccatattatagccttcatccagcagctggtggaagtagaagcagacacccacagctaaaccttgaactgaactgaaatccagttgtagagaaggaggaggactgatgagcataggggtccataccaggctggtgaaacccacagaaaccgctgacctgaacaagggagagctcttggtccctagactgatagctggaaaaccagtatgggactgattcaggccccttaatgtaggggtcagggaggagaccttggaactctatggggcttcttgtatggatcagtacttatccctagcataggaatggacttagggagcccatcccacatggagggatactccctgatcctagacacaagggggttggcctaggccctattccaaagaatttgatagactttaaagaccccctatggaagcctcaacaccctggggagcagaaagggtatgggatacgtagggtgttagttggggggtggggcgggggaggaggggagggaaagggaccttggatttacatgtaaaataattttcttcctaataaaaagaaaaaagtatgggtagagaaaatgtggtacatttacacaatggagtactactcaacagaaaaaaaaaacaatggaatcttgaaatttgcaggcaaatggatgcaactagaagaaaccattctgagtgagttaacccagtcacaaaaaagaaaaatatggtatgtactcactcataagtggattttagacatagagtaaaggattaccagcctacaatccacactgccagagaagctagtaaacaatgagtaccctaagagagacatacatggtcccctggagaaggggaaagggacaagatatcctgaacaaattgggagcatggggagaggggagagggaactaggagaatgagaaggggcgaagaggagggatgaggaagacaggatggggcagggaagttgagttgggggaagaactgaagagagcaaaataagagataatataatagagggagacattatagatttcaagagaaatcaggcactagggaaatgtctggagagctacaaagattacaccaagtaacaatctaagctacagaggagaggctaccttaaatgccctctcctgataatgagattgatgactaattcatatgccatattatagccttcatccagcagctgatggaagtagaagcagacacccacagctaaaccttgaactgaactgaaatccagttgctgagaaggaggactgatgagcataggggtccataccaggctgctgaaacccacagaaactgctgacctgaacaagggagagctcttggtccccagactgatagctaggaaaccagcataggactgatccagaagccctgaatgtgggtgtcagtgaggagaccttggaactccatggggcctcttgtagtggatcagtacttatccctagcataggaatggactaggatgggtgcccatcccatatggaaggatactctctgatcctagacacaagggggttggcctaggccctattccaaagaatttgacagactttaaagataccctatggaaggcctcaaccccctggggagcagaaagggtatgggataggtaggatgttagttggggtggggcagtggagtaggggagggagagggaccagggattgacttgtaaaataattttctttctaataaaaaaagaaatcattcatcacagggaaattttaaatacaaacacacatacaaaatatttaacctaaggttttctttcttggtggtagtgggaattagttatgtcactttcctgccagtttctaccttttaggtcaaagctaactcacttatagatgagtaattttatgtaattaatgtatgcttattaaaatgtctaaaacagacacacaaatgaatgatttacccagtattgggtccatgcacgattatttctggaatacacaaggcagagtaaaatgagttttagtgattgcaggcattgatttatttttaacattataattttattttatgtatatgagtgttttgccaacacacatatatggatgggtaccatgtgcatgaaaggagcactggtttccttggaacttgagttgtagattgttgtaagctatcatgtggatgctaggaattgaatcctggtcctctattcgatcaagtgcttttaactactgagctttctgtttttccacaagagcccaactaatgcatgaggtgctagcatttattattttatcagttgcacatatcaataagtgaatgaaactattgtctatgtgatcagtacaagttctatgctaagattcccttagctcatgtaaagacattctttttttaatggtatctttaaaataaaaattttcactcattgttttatttgtcattgatctcaaactcaaagttttcttcctcagtctcccatgtgctgaacttgaagttcagccaccacatagtctcacacataacattttagaactagaaaacagtcaatggttttataatggctttcttttcaacttctagtctgcttattttagaaattttacttttaaatgacaaaatttgcactatattatcttccctcaaatatgtgcacaaataacactgaaaaatgaaaacactgaaaaaatgaagaaaatagactttcaaactgcaattttttaaagctggcaaggacaagaggctattttctggtaccatcacagtggatgtgactaaatgtataagatcagcatagtaacaaaccagtctaaaccccagaataagtggaagatgtctcatgtagtgccaccttacctgaggagctgttggcaaatgatggctgctaggggagggagagaatgttttctttggggctacagtccctgacaactacatattctccaatagatggtcctacacccttgtacacacaggtagaaccaagtaaaatcattgaatttaaaactaaaaggaaagcacatgaaattggcagaaagaagtgacagggagaacattggaagggaaggaataagggataaatttatgtaaaacattaatatgtatgtatgaaattctcaaaaaatgaaatatttaatcaatgaacaacacagcattgataccttaactgtaaaattttgcacatgtgctttttatatgtgtatatgtatttgtgaatatatatatatatatatatattaatttgaatgaatgagcatacatatgagctaaattagctaggttcccattaaaagagcagtagttggtgggaaaagaaagcatgtaacgcatataattcttggtcctatgccctaaaaagaaggatgtgtttgcagattttcttttgtttgtggagtatgagaggaatagtcaggcattggggcctgaagctggggaggcagctgtattttctcctctgtgacaggaacagggtgccttgttaagaattcccataggtaacagatgcctttcctcagagaccattttaaccactgtgtggggatctcagagttttataaccaaaattagtgttctctcttaaatatgtttgtgttagagttggaagtacataagaaaagggtgtttccaacctctgctgactgagtctaaatgcgtaattgaattatgctagggatgaagaatgcatcctgggaacaaaaaaataatctttggtatggcatatggaaagaaggatctcaagaattattgtaggaagagtctgttaaggcattagtatgttcatgttaatggtgtgtgtgtgtgtgtgtgtgtgtgtgtgtgtgtgtgtgaatctgaatgaaagaaagggacactgaggagctaagactttctcagtctcataactaaatttgtagtaggcaaacaggaatcggcaattctcttgcagcccagcgcagtagtgcccctgttatatatcattaggctacttcttcaccagggagatggaatgaaatgaccttgtttagactaaggataggtagcagataaagagaaaagaggatcattgaggtaaaaacaaacttgaattcagatggtcaaactgacctgtctctcttaattgatattcaacctgaagaccagaatcaattccctttatcattctccctagtaccttggtccagcacttgcctagctaccaaagatttttgctgtattgctttttaacattttccctgctctgctgcaatgggacttagccaaactacaatctattcaccatttaagtttttttttcttaatagcagacatttcctaagtaagagctattggaagaaaccaaggaatcatgtaatatcagttacaaggtaagcagtttttagcatatgtacagccttgtgcctaatgacaattagatcatttccttgctatgctgttttgggcatgatgcttaagtgtggtcttagtttcctcatccacagaaggaagagcatttatttataaagtcatgaagattaaatggattaatacgtaagtcatgaagtgtagagtctacaaatgttttttattactgcaaatattgttctgataaaccatttttgtaaagataaacattttctttctgttaagtagcacattttaaggttacagatagaattataaaacctagaaagaacttgtgacagtcactggtagttttccttagctgtactgtagtctcatgtttagggcatattctgactatgcaattggggtaccgtcacagtactgttctctcttcaaggtgttttccatcttatttaataacttcattctataaattatggtaaactgttactgagggatgaactcccaggggacatttactgtctgggaaaggaataatgaagggaagcttcttataaaaaaccctgtgatatgagaatcagtgtacgcactggggatgaccctgcggacaggaaaggaaagatgctctaggcagaagtgatgttctgcttgaagcatacagacatcagtgaaggcaggagtattaatgctgccgataattcagtacctctgtggaaattatgggagaatggggtgtctgtgtgccaggactgagaagtaaggaagtaaggaagaaagtagggggaatatcatagagagtaccaacaggttgaggctgctaagtaattcctgctcttggcagggttccgtgactagatttatctcaaatgggtgagaaatgatcaggattaaagtcttagaaacaacaagattttaattgatattaaattcagaacagtggcaataattggtaagaagttactttgactcaggagtgaggggagaacaattagctccatggctgtggatttaacccggagaagagatgaagagggctggaaataggggggaagctaggctatcaaggagataggtcagaatcctgagatggtcagcttcatggtaggtaaatgaccacaaagtggctagatttgcagggctcacactgctacttttcaatgcaagtgaaattaaccactctcttgttggatacccgtttgcatgttttatcttcccctcaatattttaggatgaatatcacagaacacccttgaaggaaggaattaatacctgtcatgtttaaatcccttcatatgttcaaaaatgagcaccgtacttggaagcacatcctgtgtgcagcatcctgacttgcttctaatgctctctcaggtatgactggcttcatggccgaggtgaacctcactttagtgacggagttccttctcatagcattcactgaacacccagaacggggcctgcctctgttccacctgttcttatttatctatctcttcactttactggggaactcaggcatgattgttttgatccgcatggatcgccggctccacacccccatgtacttccttctaagccatctctctttcatggacatctgctactcctcagtcactgttcctcagacaatggccgtgttgttggagcatggggccactttagcctatgcacgctgcgttgctcagtttttcctgtttactttctttggctccatcgattgctacctcttggccctcatggcttatgaccgctatgtggctgtgtgccaacctctgctttatgtcaccatcatgacacagaaagcccttctaagttttgtggctggggcttatgttgccggcctcctcagtgctttggtgcggacaatctcagcattctccctctcgttttgtggaaacaatgagatcgatttcatattctgtgaccttcctcctctgttaaagctgacctgtggtgagagttacacacaggaattggtgatcattgtgtttgccatttttgttatccctgcctgtatggtggtaattgtggtttcctatctgtttatcattgtggccattctgaggatcccttcagcaggaggccgggccaagacattctcaacctgtgcctcccacctcaccgcagtgtcgctcttctttggcaccctcatcttcatgtacctgagagataactcgggccaggcttcagaaaaggatcgggtagtgtctgtattctacacaacagtaattcccatgttgaatcccctcatctacagcctgaggaacaaggaagtgaaggaagcactaaggaacgttcttaacagagtcaaggtttcctaacctcttcctaccttgggcatctattttctaatgccagcactttaggacttctttaattacactattcccaatatttaaatgatccagggtttataagaagtgagaatgtttagatccagggagaagcaagaacaagtgtaaaggtcagccgaagaagagatttgagtgtggactattaatgttaatgttttgctacatttacttcattaaataaatatgatagattcattaatatatccattcatctatttgtccatcaaactctgttatcttttattcacatcaacgtaaattgcaggaaacagcattaaaacaccgactatgttattccaaacagtgtattcatttgagattcaaaatttagaatatatttaatttttagttgaattttaaataaaaaccttttgagacatggttctatgtagtctactatggcctcaaactctctaagaagtgaggatgaccttggaggtgaagatggccttgaatttctgatcttcctctaccttatgattgctgtaattaaaggtctccattacttgctagacttaggcaactctcaggatcaaacataggactttatgtttggtagacaggaattatcctacccaattgaattatttactagatttcgatgacattataaaagtggatgggggtggggtgggagaaggtggggggaaaaggaggacaggaaggagagggaactaggttggtatgtaaaataaggttgtttttaaataaataataacaataataaaatacttatttactttcacttatttgtatatgtgttattgtgtgtgtgtgacagagagagagagagagagagagagagagagagagagagagagagagagagagagagagagagagagagagagagagggggattcaacttccatcagtttgtaggctttctggaatttgtgcttttgttaagttctaattttaaaccatggtgatccaataagatacaggggtttattccaattttttttgtctgttgaggtttgctttgttactcagtatatggttgattttagagaagtttccattggtgatgcaaagaaggtataattttttgtttggatggaatgttctatagatgcctgttaaacccaatttaatcataacttctgttagttcctttatttctctgttaattttctgtctggtagtagttggttaacctgtatctttttataggtgaattgagaccattaatgtgggagtatctattgcctatgtttttgtgggtgtagctaacttccttgtgttggagttttccttccagtactttctgtatggctggatttgtatatatgtattgtttaaatctggttttgtcatggaatatcttgttttatccttctatagtgacttaaagtttttctaggtatagtagtttgaactggcatccatggtctcttagtgtctgtagaacatctatgcaggactttcttgcttacaaagtttcccttgagaagtcaggtgtaatcctgatagatctgcctttatatgttacttgacccctttcctttgcagctcttaatatgctttatgttttatgtggcaaagggacttttttgttcagtctatttgatgttctgtaagtgttttctacttcaataggagtgtcctttacatgggaaaagttttcttctatgattttgttgaatatgtcttttctgccattgagctggacttctataactttttctatatttattattcttaggtttggtcttttcacggatatttgtgtaaagaatttgttgttttaacattttctttggtcgatgaatctatttctctaatgtatcttcaacacctgagatcctgttttccatctcttgtatttccttgcttatgcttgactctgtggttcctgactgtttacttcattctatctttccattatttcctcagtttgtggttttttttaatttcttatagttcatttttcaagtcttgtactgtttgaactgattccttcccctgttctattgctctttctttctttctttctttctttctttctttctttcttttgcttttcttgctttctttaagggatttgttgagttcttcttttttggttgtcttttccttcatttctttaaggaagtttctcatttcctctttaagggcctctatcatcttcataaagctttttaaaggttgttttcttctgcttcatctgtgttggaatattcaggtcttgctggtgtagaacccctagtctctgatggtgtcatgtcactccttaagttgctgaatgtgttcttttgtttgttttgttttgttttgttttcagacagggtttctctgtagctttggagcctgtcctagaactctctctctctgtagatatggctggtctggaactcacacagatccacctttctctgtctcctgagtgctggaattaaaggcatgcaccaccactgtgaagcttgaatgcgttcttttactgtcttctacccatctcttccttcagtggatgcaagtggagcctgagtttcagggaatctctcttcctccaatttgtctaggtggatcctgtggcttatgtggtcactcttcctctccaggtgagagtggggccaagatgccaatgacagcacatacagtgtgggatgattttgggcatagggagggagcctccaggtctgtggggttttggtgggtggggatggggagttcaaagtatcccaggccattaggacctaggtgttaggggcctccactttgctgggggcgtgggcatggtggatggtccaggctcttaactctcctggtgggggcaggtccaaagctccaatggtggcagatgcagtgctgattggtttggggtctgggggtgactgctgccaggtctctggggctttggtgtgtgtggatggtgtatgcaatgtgccccaggtgattaggacttagaggttataggcctccagctggggggggttgtcccagatactcacctctcctgctgggggttcagccaaggctccaaagttagcagatgtgatgctggatggtttgggtgtcgggagactgcccccaggtttctggggctttgttgggcaggggtggggagcacaacatgctccatgctattcagcctacccttttctaaatagaaacagaagatgagattaaggaagggatgatgggaggtggggaaggaatgcaggaaaggagggaggggaaatgttaatgggatgtaaaataaataaataaaattttaaaaattaaaaaattcttgtgaaaagtgaaatattttattctgttgttttgtttctggatccactttaattgctttttaagtcatgagatacacttcaaacttctctccccaaagggttaaccacttctaccatcagaggttgaataaatatttcttccttcaaggatgtaaggcaccaccttcactgtacacatgcttcttgtgcacactttgatgtgttttccaggtttgttatttgatctagagatatatttccaattctttcaaaaatgtattttattttatctttacactaagcttttatgtcaggatagtttttacctgtctccccatttttattttcccaagttttcttggttgtgtttacctatttttccttttttttcttacattgtttcctgttggaataatttattcctaataatatgccacttttggaacaattcttcatacaaaattaatgcaaattataaactttatacaacttattgttatacattttgatatcttagcatatattttgtagacatttctatacttacttcaatatttataaatccactagacttggtactgaaactttctaagttcaaatcattaaaattaaataatcaaataaaatggaacaacatctaactgtaatacttgatctggatgacttcatgcatgatttgttcaagagagatatgatctcttctatttgccttccaggtggtctatttcaaacaacatcatatcatgagaaggcttatgttttaattctcaaactctatctggcatttaaaaatctcaaatcctagattagtctcttgctcagtggttctcaacctgtgggtcatgacccctatatgggttgaatgacctttaaagaagtcacttaagacaattgggaaacatagacatttacattacaattcataacagtatcaaaatgactattatgaagtagcaatgaaataattttatggttgtgggttaccaaaacataaggaattatattaaagggtcacagcattaggaaggttgagaaccactgccgtatatgaatattgacgataaacagctcataactacatcatttcctagagaatttactccattaattatttttctagacatgcctaggaagtcacatccaatctgttgaggatggtatgtagttaatgaatgattgacatggcatacaaaaatcctaatccattgtttataaaaaagaatgtctgctaaaattcacatccaatgcttcaaaaggaacaggacaacattggactcttgatgaaaagaaaatttgcttaagcatttcctgcttcattttctaaagtgcagtattctgtgagcactctgctggtgaaacacccactttccctgctccaagtctttttaaaaggaagtgtaaggtacagcaactccgtataccttaagcagaacttctaacataatgtctaattttaataacaacaacaataattaaccaaagtgctccaggtatccattccagtcattcaaaaggaagggaggaggtaatagatgctatgtaacttctattaccacctgtacctgcccagttccagaattaattgtctcatcactgttgactgtgcgatgtccatcctcttcctctactctgccccaaattttcactgtactgtacaaacttccggggaaacagactaactcaccacagagtcacttcaatgttttctttcagaaaataacaaccaatattgccaaaaaatatgcattgacacttacaattgcccatgctaactctcaggagtcccagtatttaataggctgcttctgttccttgtaatagattgttaaatcatttggaatctgcagttgaaatccctgtctaggctgagtgcctgctaggcatcaaaaagtttatccaggtgctgtcatttagaaggaaatgaggtgagggtatctttgagagtcctttctactggaagagctctgagacctcaattctaagtggataaaagtaaacagagcagagggtgaggagcaaggtgctctaggaatcatctgtgtgctacaggcggcaaatcactaaggaccaatgatgaacaactgacactcagagcaaattgaatggttctaacaaagagaatgtagatttcagagacaagtaaatgataggaaatggaagagagaaaggtgattgcagacattctggaagtttatctttaagccagggtagcagatgtgctactcagagctgaagcaaatgaagtgcatttagactacccatactcaatactccccgattcaataatcacatttccttatgaaatacttagccgatactggaactgccatgtactgacttgtgcgtatctagcaagattgagggtgaatactgtataaaagaccttcatggaaagtcctcaacttcaagctcctcaataacaagttgagcagaacataggttaactcagtgccaaaaagtttattccctgaaggagttgctattgagctgtatgactcaggatgtttaggagtttccatgtaatcccaaaaggtttgcttttatcctctaagctgagtcgaaggaatgagataatgagtgtcttccaggttgtattctctctgcagggtttagcttttcttagaagccccagaagcatctctgaagctgatttgtgatcaagggaaaccgttctgctttattgctctcacagaagtgtagatgattctgccaagtaattttcatataactattgccctggaaaccctggaaagacaatggctctaaaataagtcacacacaatctaggaaaggtgcctgggagatttagccttggctattggaaactgttatctcatggaacattgtttatcctaggaatatagtaggtaagactgagttatgttttgactgaaacttaaaaaaaaacataatttcatgtgaatgggcctgatattagactatagagtttagacacaagatttccctctaaattatcatatgctgcattcatccactagggggaagcaaccttgtacatttgagtacttatttccacaaagaaagattttttgaggatgccaatcatttcactgactagcatggaaacttatttaactatacgagttcaagtctcctcaaggacaaaataactcataggatcataggattgtgtaaattaatgtgttcagaacacatcatattgtgattggtcaagaaagatggcctaaataagttcaactgcagtgtggggcccaaagtagaatctaaaaagcttttctttttagttgtagcatgtctggaaaaataactgtacccagagctcagtttctccatatccaaaataagtttgactcttgttacttcataatgttactgtgaaggtaaattaggaataacatttttaaaagtgcttagcatgtgcttgaagcaaagtaagaacacaatgcatatgcgcaataattttgagccattaattccagaagttaggaatttagctctgttgagctttaatgtaaccaaacatattcatccattggaagaaaaagaagaaagagattgtagtaaggttacaatttaaagtgtgaggtttaggtcccactgttctctgctgctttacttttggctaagacactgctcttcccctagggattcctgagagacctcatcatcttatgttctgtgtggtataatcaaaacatattacaggtaatactgtcaacccacacatatccttggctttcttaaaatccgcattatccttctagtcgcccatcacatctggctcttttactctttctgtctccccttctgcaatcatccctgagctgtggaagtaaagggtgtgtggtatatatctctgattacggctgaacattctgaagtttcttattatctttacatcaaccaattgtaggtgtatgtgttcaccactttctactagaaaaaaagttttagcaactattggcaattggtagatactggaagaaggagaatcaggttttagacaatgcttcagtaatggttgcacattcaagagtatatatgaagcacaaagtagacttgatgggtttaaacaaaaaaaccaggatacaaagctgtatcctataaagataaagtggtgtggctttaggaggagttggcacaggaggatgaatatgatcaaaatgcttttcacaaaactctcaaagaactaacaaaaagtggtcattggacacagaatttttacttctcttttgtaagcagttttgtgtttaaggagacttattgcctctctctactctggccacaatctaaaattgtagtttctcaaaccccaacttaaataatactacacaaaatctgaacatactagctggcctctgaaaacttttcttcagtaaaatatcatgaaaattgtctttagatgaaataaccaaactcagccagctttaaaaatgtcagttctaggttgttgaaaaattcattcatacttgcttcttggttaagcaatttacctaaagacacaccaaggaaaacacagggcaaacagtctatgtcaactcataaccaggaaagagagaaaaaacaaaattactacaaaagtccaaagcaaaacctaattattatttgctaatgatattcaagaagtatgtgtctgtgtttaagtttttgacagaggtatgcatacaattctgtttctgaagatagaaattcaatgtgatcaaaagagtacagggtttggttttattcaaataagcttgatgaacaagttccatagcctctttgagatttactgtgattgtccataatgcattcatgaagcaagtaagaaagttaatatgatgtgggtttggagacagggaatgtgggagacacagagagatagaaagacagagagagaaagaagagcgacagagagagagagagagagagagagagagagagagagagagagagagtcttagtatggttgcatttgcatctccactcagtgtgctgccctttagtctttgctcaggttctttaaacagcaaaattacaaggattccacataccagtcaagaggccaaaatgtaattaagcaatttaagaattagatcatgagaaagatattgaaaattagccacattctttctttgtttcaaagtgagaagcttccaattaaccacagggatatttttccacactatgaatataaagtgaaacaaaagtttcatgttgttacaacaaggaaaattcttgcttgaaaataaattcttaatgacttcaggaatttaattgtagattcaaggactttgagttaataaattccaatctgaattggataatgacatggtgtcaaaatactcggcaagtgattcaagagtaccaggaaaggagagtggaatcaagcaagagtcttagatgggcctctggttccatctcaagtaagttcagaagaatttttatattttgagtcaatattacatcatgttacatccacagctgagcctggtgtcaccctcctagttatttactgtcaactgcctataaaatattcaaaacagaatgttctagaacagtagaaatgtctttgaaagcttctttacagatccagtcaaagtctgaaggcactttcatgaggatccagactgtagtcacagaatagtcaagaacaagcatgtgttgtgatatgaatggaaacaagatattttatgaaatgcaaacattgtcatgacagtatattaaaaattatatataatctatttaagtaatcaatacagttcaaggaaaatgtactcattctactcatatttgaatactttctttagaagcagcagaaacataatggcaagttttcctcaatccctgcaattgcactattattattttaatgtatggtattattctataaaaataagaaaaaatatctctcattattaataaccaacccatagaaaaggtgtagaagatttaactcaagtgatacagagtgttacatgaatgaggtaaaacagtgaaagttgttaaaatggagaagaaagtaagcaggaattagagaaaagtatttattttctttagtaagagtacaaattttaatcactaaatattgaaacacacacatatatatttgactacatatgtgcaaaacatatattatttaaagatatatgaaactgtatagtaaaatatgaaagaaacacattattgtcagtagatgctatctaaaattgatgattacaatgacaaaaataataatggccagcactgtttagctcttgctttatggtgagcactgctctactctccttccagcattaaattatttagcattgacaataccccaataatatagaaatgtatttccttattatgattacaaattataagaatatggatttaagaacacacatatatgcacatgtacacacaattatatatatgaatgatatgaacatagaaaggggactatggggcaagaggatggggcctggctaggggagacagggaaagaagaaagggttatgggggaaaaaatcaaagtatcatttctttcccctgatatgtggagcctatgttgttcagagagagtagtaattgataaaaggaaagacagtaacctgcagggggacaggaaggaacactagggtaaatgggcaagagtaaagaacaattatgaatatgtataaaatatcacaataatgataaaagaattaacaatgaaaacaaatgatttcacaaaggaatagaggcacaataagattaaataatgatacacaaggcacagagctaaagcataggaaaactgtgagtttggatgtatttcaatttggaagctacaaactgaaaaaatttttgaagcacagtatgttaaatgtgatggatctttgaaatggaatggtaaacactgaaatggaaaaaagtagttctaatattatttgaataggcaatatcctggaaatgatataatagtaaaaagaatataaggatgtatgtaataaaggattactcaacacacaaaaaacaggctcatccactctctacttctttaaggctttcataaaaaaaataggttacactgatttctggataaggacaaaagctgaggtcagtgtgtgggagaaaaagagatgggggagggagggggaagggagggagggagggagggagggaggagggagggagggaggaagggagggagggagggaggacagggtcaggattcagcttcaagtagagaattaacaggttggactgcctaaggatagggagtctcatatggatggcagatgaatatatgcagcaaagaagacacttttcagtaatggggtgggaacagaggtacaaaagggcattttggtcttccccaaacctgagaatcatctctcttgtcctcacagaaagttacaaatgtaaactagaattaatttgaagcagaaagagcaactgaagagctacctcatacaatttggaaatgtttaaggaaaatcagtcaaattcaacaattcctgaaaagcacttgtgtaagtaagctcagaaatacaaacttaatacctactagagagaaacgactggtcttcagtcctggattctttacaacacacttttatcttctgatgactaaacagttcacacttaatatgacaaaaaataatctcaccacagtaactgaatttattcttgtgggttttactgaccatccagagtgggagattcctctcttcctagtgtttctgatcttctatcttataaccatccttgggaacatgggcatggtcattcttatacaggtggatgtccatctctctgtaacggatgcctgctacacctcagtcatcactcctcagatcctggccacactggccacaggcaaaacagtcattgcctatagtcactgcgcagctcagttcttctttttcaccttctgtgcaagcacagagtgttttctgttggcagtgatggcctatgatcgttatgttgctattagcaatcctctgctctacactgtctccatgagtcctagaaaatgctggagtttggtagtgggagcctatatgtgtgggttgtctggatccattcaaagaaccacatgtaccttctccctctccttctgtaaagacagtaagatcaatttctttttttgtgaccttccacctctgctgaagctggcctgcagtgacacaacaaatgctgagattatcattgttttatttgggaattttgtcatcttggtcaatgccttaatcatactcatttcctaccttctcatcatcaagactgtcatgagaatgaagtcttcaggtggcagaggtaaaacattctccacatgtgtctcccacatcactgctgtggctcttttctttgggaccctcacctttatgtatataaggagtggctcaggcaaatccctagaggaagacaaagttgtgtctgtcttctacactgtggtcatccccatgctaaaccctctgatctatagcttgagaaataaagatgttaaatttgcattcagaaaggtcactaatagactgcaggtgtcccagagtatatagagctgagtaacatgatctctcctcattgtcaattttgtatgcatattattaatatcctgatagataaccagcaatatatgcattatgagtctatgaacagagagaatgctggtaagttgttccaggcaagaagaaaagttgtcatgaattttctatccaggaatggaagtatctttcttttttgtcattatgtcctgctgctctctgatgccattacttagagaaggtctaagggattatgtgatttttttttttactctaaattctggtatactttccatattgtcttcactgctgtccatattattgtacttattgtgtgaaacattacatttcaggcctcctgtgaattgagttatttggctgttttgtttttttatatgtaaaatatataatacaggcttcttccttccattgcagtgtctttctttatgatgggctagaataaaagagctttcaaattgtcctgataactcactgcctttcttctttctttattgatatgttgacgacttcagaatcaatttagccacctcacctatgggaaggtacctccaagggtaaattctggctccagaaggacagtgcaatgtcactcctcctcaccctatcgcctacttcattggaagctgccttccaagtatcctgcttttagggttagcaatgtgagagagcacagaagcaggcaattaagcgactcattcccttctttacagtagacttgatgacctatgagcacaatagctcctgcatcaggcctcaaaaatcagaggagatctcagaaattgcatttgaaataaatttctgtcacatgaacttttctatttgcatttctttttaacttcaaaggcagatgagaagatgttggcacatatgacatttccttttagtaataaagaaaacattttccccagatgcacagcactcagaatatacagcagcagacaaggcatggggtggtttgaatgtaaatcttatttgcctctaatcacttataagaatttgggtaaatatttggatgcaaagtaaatgcagcaatccataattgaaatatagtataattattgagtaagatgataagtaaaaaatttcctagatagctcatgccagtatagattgatcctttctttacattctcatacctgtgatatcaaccctatactgttgctgctttttaaaaattcaataacaatatgaactaagggttgtaaaaggcagtggacagaggaagatgtattaatcaaacaaattttcatgtttgtttgtggaaatatatttattacacctcacataatcaaaggtaactgtagaataccttctttaaattttcttttgctttcttttttactttgggtgttttgtgtgcctgtcggtgcaccatatgtatgcagtatcctcaggaggccagaaaagggcaacaaatcacctgggactggaattacagttggctgtgaactgccttgaggtgctggaaactgaacccgagtcttttggatgacctcccatctccttactgtcaatccttctctccatcttcaaggacatctttcttactgagcatattgctttgtgccagtgaactcttaaatctcagtgccattttttgaggcacttactcttttccctccatgtggaaatgaccgttaaattagaatagatgactaaagagagctttctgttgattgagtttgtgttcagcatctgtcccatgttgtgctaataaagcttttcaatatcttttgtgaatgcagaaacatgaaagagatttagactaggaaaaaatattgacccacacacagtatttacaaataactactagaattatggagagatgcttaatttcagtaataatcagtagtttcatgtttaaaacctgaatatgcttcctggttttctaaaattttaaaagcaacatggcttcatattagaaaggatgtgtacattggtgggtatagactgatttaataactatacaaatagtttgacattttcatatgaaaaccaaaataacagcacaactaacccagtgacctgcctatgtactataaaacaactcttgctcacagtcattaagatacaagtaatatcttcctagaatcttgctgtaggaactcaacactcagaacattttccttccatgttcattcttctggtactgagtgtgcatgctttggatggaaccacatgccatttgaggatataaagagacattgagtatgtaagcaatggatggatggcactaaagaagaaaaagatagctatttgaacaatagcatcttctctctcaatgtaggcactaagacctataccttttttgtacaattacttcattttaccctgtagattttggtatgctgtattttcactcaattctagaatttttaaactttcatttttatttcctcaacaacctgttcatcatttaatagtatattgtttaatctccacaagcttctaagtttctgtatatcttatggcctcatactcctgatttatagctttgtttcaccattgttattatatagaatacaatcatttgtttcagtattttcctctatttgtcaatttgtctttgggtcttaattcataaaccacttagagaaagatccatgagctgctaaggatctgaattttatagtgttttaatggtatgatctataagtgtgaatgaaaaccctttggcatacagtgtcatttagttaagatatttccatgtagtgtgtgtgtgtgtgtgtgtgtgtgtgtgtgtgtgtgtgtgtgtgtgtgtgttgttgttgtgtcaattaatttgagtactgagatcaatcactattattgtgctgtggttaatttgtgactgttcatcaagtagtatttgttttatgaaactgaatacacttatgtttagtactcataggcttaaaattaaaatgtctccttgatgggttgttctcttaatcactatgaattgatctcctttgtcttctgaatttttgtttggagtccattttgtcagctactaaaatcaaaactattacttgttttctcagcccattttggaggaatatcttttccatcttttaaccataaagacacaactgtcgtctgtgcttagttacagtttctttgagataatagatgttgctggttttggtccaatctggtaggttttatcttctgattggagatttaagaaaagtaatgttcagcgttgttgtgggaagataagtaccaattcgtgtcattttgttgattgtgtagagtcagttgctttcttattcctctgttatgtcgctattattccagtgtggtttattttttcctgtggcatcatggacttttttcattcgttttctcttcaaatcaaaggtttccttcaagaatcttaaatatcttggctagtgatcatgaacttctttagcttattcttgtcatggaaagtttgtttttctcttttaatgatgacatagctttggtgagtataaagtttggattgacaggtagttgtctttcagaacttgaactgtatcattccaagctttagccatttaagtttctattgagaaattcataaggttgcctttatatgtaacttggtgtttttctcttgccacttaaaatatatttccttctttttctgtttatttgatagtttaattatgacatgataaaagatctcaattgttttttggtcttgtctgcttgctattctaaatgcctgttttatctagattacatatctttccttattttttggaaattttcttggttgtcctaaaatattttctataccttagaattaaatccttcttttttaggcacatcatgattatgagggaaattttcatagtttcccacatatcttgtaagtctccctttttgctttgtcttaaattagttaatgcattttgggtttggagaacatgtgctggaaatacttgtgaagattacaggataactttccaggaggtgggttgtatccttacaccatgtgggttgtgaggattgaacacaggtatttaagactctgcaacaagctccataacccattgggtcatcttactcacccaacttttgtattaacattgtttttgtcctcattgaattgcttccattcctgtactttatcttcagctcatatattctatcctcttctttacacattctattggtgagattttccacatactcttttctttgacttaatacaatggaaatttcaaatacttcatttaagtatttagttcttcgtttatgtattgtgactgtgttatttcatttagctgttttgtgtgatcttgggatttgtcaattttctttttgttatatatgtgcctacattggattatttataagatacacatcagatattctgatatttagtaacttcctttctttgcagcgtatctttttgtcacctggcatccacaatctcaaaaccctgggtaggccaaatgcttgctaaatatcaaaatgcttatccaaaccttgatacttagaacgtatataacatcagtgacactccttatactagaatattttcaatcttaggataccaagtaagagaaagcaaacaggctaggatgggtctaactgaagaagacatctgtttattggactgtaagaatctaccatgaagttgaagaaacaagactacccctaatgaataattatgaactacgtaatacaaatgcaattatgcaaattatatgtttctagcaataaagactgtgggtttcagaggcaggaaatatatgagaaacagagaaaaaaaaaggtagctggagaactctgtaaatggatccattgaaggggtgggaaagcatactgctcagtgcagaagcagctgaatatcctaccctagacttgtttgtcaagtcaaaaatcatccttctgtatgaaaatcagcaagtcaatactattgggtttcagatttgagtcataactacacagtgggtataaaaatatgtatagcctaaagagaattttaggtgaagacctttggtctgactttcaggcaactgactaactcagcaaaacatgcctatttcctgtagaagctgctgttgatctccagaacctagaagtcttaggagttgccatggaatctcaaatgttagattttatccactaacagatgtggagaagatgcaaaaataagcctcttcctgagagaaacaatgggggagcttttcccaggagtcttagcacttgtctctgggctgatttataattcaggggaatattttccattgtgtaccttctacatgccatccccaaatgcattttaaatactcactcagttgctatgcaaaaaattctcaaatggtcctattacattgaatcatgtgtgtaatctcagttgctttttaaaaatacttaatgcctttagtaatttgaatcctagttctccaagctgagcagggtgattatatcatctcagaaaccaggaaagatactgggcatttcaaaacaaaccagcaaaggcaaaattagggagacaataaagcaattgctactggaccttctctttttaatttcttttaagttatgtgtgttaatgtttttgctttatgcaatttgtgcaccacatatgtgcctgataccagcaggagccagaatatggcatcggataccctggaactggaattgtagatgattgtgagatgttatgtggcttctaaggagagaatccaaatcagtgataaaagatgaaagaacagccagtgctattaattgatcaggtatctctccagacccagatcttctagtcttagggtaccatatccatccttagagttcagtttccatctaaattcacaggtatgtacaaattattttgtttttgtaactaaaggttttcatttctttgtcattgggttcactaggtaccttttagaacatacagtttcttgagagaggctttttaccagattatagagcttagttttgagatttttctgagaatgtgaattctttccttctggtccatatgctgaaaccacttacattagagttacatctttggaataagataaacctacattagattccaaattactgctttgaccccatcttttaaagcttagtctcctcaaggacagcaataacaactcttccctagaatcaccagttgtgtaaaataatgtgtgaagaacatgttacattgtgattgttctagagcaggtactcaatgaacaaagcgccagagttcagaaaagtagcaagtcatgaattagttcaattgtactcaagttatcaaggtgggatcctttgttttcagtagtgacatttcagacaaatcatttaatacctctggtcttcattttccttatatgtataataaaagtaaaattctgaaaatttcaatatgggatcatgaagtttaaaggaaataataactttatcatgcttggcattagtcagtctccgaacgtagcagtgttttgagagactaattctagtaagataagaaaaggtactatttttgagctcctttgttgataaccctccaaccacctaggtactcaacccttgcaagaactagaaggaagagggggagactatgttgaaagttgaagtaagtataatttttaggattaatctctttttaaaatttctttatataacatatccttgtcttcccctctaagatctaatattctttattgtgcattataaattatgatattgactcataaaaatccccaaggttgttttcaaaatgttcactaatagtaaaatgggttcagtaaggctgttggcttcctttattctaggatcaaaccaactggatggtgtctcaaaccctttaaatagcattttataaaagtggatatatcagtctcaccatggaagtttactttgtaagataacttagaaatttatgtaaacaaaaccacatttgatccttaggaaaaattaaggttctttgtcactaaatcacttttaaaattacatacctaaaatgcacataaatgtatatgtaacacacaaaggaatttgtcaaaatatggagtgtagaggcatctgtataggtttattgatattattatttatgaaaagggtaaagacacattacattaaatgggccattttttagtaatatggcttttataatgaaagtctcatgtctctacaccaaaaaattcctggttaagcttcttaaaaataaattcttaatatattttgtgtgctcatacattttgttacagaattagcagctttcagtcagcaagtttcaacctggatttcatggtggggaatgtggttttaagataatgggcaaatggttctggggaaggaatgtagggtaatggaagaagggatctttaaaatggacagtaattcttctgtatgtgaagctaatggggagttttcatatctgatttcagtttcccttccataaatagtgtgccaatagtgtctgtctagggatcttattgtcagtaacctatttaagtatcaatgcctttgaagtaaggagagaggtatctgtgttccggtgaagaatctttaaagaccatctggatgttaggaactttcatgaagagacagaatgcatatggaaaatggtcattatcatgcctggagatgaagtgactcagatctggaacatatgaagataagaaattgtaggaaatgcaaagtttgtcttgaaaaactaataaagcataggaaaagaacattaatttcacttgatagttgaaatcttttcccagaatcaacagaattctctattgcatgatacatataattgtaatagaaaaacatcatttaccatttccataaccaataagaagcaaaccacagaacttgtgagaagatcaagttcttgtataggacagggatgaaagacaagatttctttgacgagaagaaatacagggatcagttcacttagtgagaatacaaaaattattgtgccaaagttgcctatgtatatgtatctgtcctctagcaagctgtaatctgtaaatacactattaattagatacagaggtaaatatagagaatttctatgagttaaatgtattgtatctcagaaaaggaaccaataagacatatataaaatttataataatattaacaataataataataaatgactatatttaggtctttctgaactggacattatacctcttacacaaattaaattacttaatcctagcaggatagtggtggtgtgtgcttttaatcacagcacttgggaggcagagaaaggtagatctctgtgattttgagacaagcctggtctacacagctacttctaggacagccaaggctacacaaagaaaccctgtctcaaaaaaataaacaaagaaaccacttaacattcacaataaccctataatacaggcatggttttcccatattataggtaagaaattgaggcaaagggggcaagttactttatcaaagccatataatgaagagaataatgaaaatacaatatgttgaatttggtagcctctgagctagatgcaaaaagactaaagttcagagaaaaatatgttgaccatgtaagaaatatttatttatttatctactgttactctctctctctctctctcttctctctctctctctctctctcttctctgtgtgtgtgtgtgtgtgtgtgtgtgtgtgtgtgtgttctggaacacagtctatctgtggagattaagggacaactctctgtagtgcctgtagtcgattctctccaggcatctgtgggatatgagggactaattcacattatcaggcctgtttgcaagtgcctctgtcatgtcttgcttgttcccgatacggcgtttttctcagcctacttaaataaacacataattagaaaaatatataaatatgtgctacagggacaacatgaacagaaaatatatcatcttcaaacatctataagaactacatgaaaagaaggcattagatggatttgagtgtcagaaaaggctaagctgagatcactgtgtggaatgtatggacagacagactctgtctttatttaagcatatggcatatgtgtgatacacgagataaggttggaatagatgttgttttggctcctttcaaacctaagggtcacttgtgccttctcttcacagaaatttctaaatataagcccaaattaatctgaatcagaaacaacagcataagtctgagctctgtcaaatttaggaaatgctccagaacaataagcatggatcaagatttctgaaacaagcattatgttaagctcatagttgcaaactcaacttctaccagagtgaaaaggagttggtgtattttgtcactgttactcttttacttcatcctcattcacagattaatagttcacattgattaaatggccaagaataacctcaccacagtaaccaggtttgttctcatgggctttaatgaccttcccaagtggcaggttcccctttttctgttgtttctcagtttctatatggtcaccattttgggaaacttgggtatgattattctcatacaggcagatgtccaactccataccccaatgtatttcttcctgagccatctttctgtgttagatgcctgctatacctcagtcatcacccctcagatcctggccacactggccaaagacaaaatgatcatctcctatggtcaatgtgctgcccagttcttcttcttcaccatctgtgcagctacagaatgcttcctgctatctgtgatggcctatgaccgttatgttgctattagtaacccactgctctacactgtggccatgagccctagaagatgctggagtttggtggctggagcctatggtggtgggttgtttggggccatcttaagaaccacatgtaccttttctctttttttctgtgaaaataatcacatcaatttcttcttttgtgaccttccacctctgctgaagctggcctgcagtgacacaacaaatgctgagattatcattgtctttttgggaattttgtcattttggccaatgctttggtaatactcatttcctacctgctcataatcaaggctgtcatgagcatgaagtctctgggtggcagagtcaagactttctctacatgtatctcccacctcactgctgtatctattttctttggtaccctcatcttcatgtacatacggagcagctcaggaaaatccctggaagaagacaaggtagtatctgttttctatactgtggtcatccccatgttgaaccctcttatttatagcctgaggaacaaagatgttaaggcagccttcagaaaggtcactggtagattccaggtttctcaaaccttgcaaaattgagtgaaaggaccactttcatttttgttcccaatattgatatttcctaggggtatagtataccttggacagagaaagcaagctagtgttgaagagtgtaaaatacaaagtggtgaaattcatacttgaaattctgttgtacttcaatgttatctctgtttgtaactgccagctagctacttgacacttgtaactactattatcctgctctatcattctggacttcctttctttctcagtttacatctacattacaaattgttaaaaggtcaaattatgtggttattttaaattgtgaaaaatagtttttcacttcccttgagatagataaatgcttgttcactatagttaggcagtatgatgatatagcaccaactccctgcctcattaaattgtctatttactctggcctgattgacaaattttttaaacaatattgatattcactaatttactatatttcttctttttgtcatgttctgctaagagtttccagataaaataagccacctttcatattctgaggcctctacaagggctaagtatagtgtagttgctaaaagacacaacacagttcctgctcacacttttgtccatgttataagacagtctcactaaacatcctgtgttattcacagcacaatgtgcatgtacacacacacatacacacccacccacccacccccccacacatatatagtttaagcataacttattttctggggcaaatatttgcttaagaagaagagtaactggggatcctatacaaaattgaaaaacctctcagagtataatattcatttccttcacttctaagtacaaagcctatatcaggtagtaactgatttggacataaattttcattattgtaaattgtctcatctgagtttcaagaaaatgaggaatacattgttacaaataaaatcttcattttgaaattaaggaaatatttcattgttcttcagagttctcggctttgtaatttaagaaatgtggcacatgagagaaagactccatacaactggtttcaagcacagaggtttttttttttttaattagggaaagggattataaaggggggaaagggaaggatggagaccagcctccagacacaggagcagcaggagagaggagaggggaaagagggggagagagaggagagaaaaagagagagaaaggacagaaggatagagagaagaacagacagagtgagggagagaaagagagagaaatatgggaggttgacagagaccttttaaaagggaacctagtgtacaggtggagctcttagtagctgctgttgagggtatatcctgtcacaacaccaaggacaggccagtacagttgcctggaataaatcctattttccttctggtgaagttttatgcaaattaatttcttagtctaaaatgaggtataactcatatatatatatatatatatatatatatatatatatatgaatatgagatcttccaacaaaaaatcagccatcagtatcaaccattctttttcttttctattgacttagttttttttatatcaatctatgatctttgccacaattctgtaacagttgagtagattgaaaatgtttataaaccaagatggtaaaagaaaatgaactaaataaaaagaactagtctatgattatcaatataaaaataaacatgtataaaaactgacaacctacaagatatgctttcattgaatgtattattctaaaagtaatattgctttttaattaatacattatcatgtatataatgaattccatttttgttgtttttttattatttattattatttaatttaacttttacaaaattctaatttcacatgtcaatcccttctctatagtgggaaattaccaatatggagccaagtagaaatataagggtatttaatagggaaaagccttacttatagagtgacctagccagtcggtgtggcagcggtttgtatgcaagccaaaaggggttgaaaactgaaagtgaaacccagccaactcaaattcttactctacataaccctgaccacgccctcgtaggcattgtcaggcagacctgtagccagcccctaagcaggcatggctacaggttcccctacaattccccttttagtctaaaagaggattaaaactgaacagtgtgaagtatccaaaattaacaatcataaaggtgaaatatagaagacacaacaatctgcttatgtcacatcctaactatctattttaactaaaccctaaagtcatctgaaagaggtgtccaagcctgaacacctccttccaatccaaccataaacaataggaagctatccctaactaggtatatatactatcctaagtgacaacaatgggggaagggggtgtagcatcctccaagttacttcctgctgaaatgggatgatgatagccttgtggggtcctgtaggaagaaaatgttagtatagtgaaagccttgaatggatagaatccagtccatgttagatgggattcgcttgattgaagatctcaattgaaatcctcaacttgattgaagtcagtacccgaacctctggccagagtgtcagttgaaatggagcaagttggatccagtgcagtcaaggaggtgtggcccattttctttacagggtgtccagggattgctgacagcaggtcttcattggctgtgtgggactcagacataaacagcagagaaatgtttgcttgtgtatgtacatatgttggggaatgtaaccatgagagcataacaattatgagagggtgtacaccttgagagaaagatccaagagaagacaaagacagtctccaacttctttttttattctgtattacatcaattggctttttgatacaatacagaaacattaaagtttagttaaataatgtgcttggattttagaggaggaaagcgaaatccacttctaaatccagcattggtttaattgaatagggactaggaaataaagagaaatagatttctctgcgagaaagctgtaaagtttaccatatggcatgttccttttttttttgatggttatagctatcttttcttttgcagacctgtggccagcccctaagcaggcgtggctacaggctcccctacacttctcccctctccctcccctcccccacaaccccccactagcctcctacccctcccctctccattccccatagagggtagggccctccacatggtttcccaaattccacatcatcatcctgggctgggcctaggccctcccccatgtgtccaggcctagagagcatcccttcacgtgggatgggctctcaaagtcccttcttaacaccagggaaaaatactaatccactaccagaggctccatagcctctgcattgacaaccactttcaggggtctggatcagtcccatgatggactcccatacagcagtctggggtccatgttctccctcttgttcaggtcagccgtttctgtgggattcaccagcctggtacagatccctttgatcatcattcctccctccctgcaactgggttccagaattcagttcagtgtatagctgtgggtgtctgcctctgcttccatcagccactggatgagggctctatgatggcatataaggcagtcatcagtctcattataggggaagggaatttagggtagcctctccaccatttagtagattgtcagttggtgtcatccttgtagatctctggaaatctccctagtgccagatctctcctctgaccaataatggttccctctgttatgatatctctcatcctgctctcctctattcttccccaactcaacctttctgctccttcacttcctcctctcccctccatttgattttaatagagttttgtgttaaaatcctgtttgaaaatgaatagcttttcttaaagggcaactagtatatattacctttcaattgtttcaggttaaacattaagcaaataactatgaattataaacgtgttacagaaaatttctgcagaatgataaagacaatattgggtctttgagaataaaacccgtatgcttctcagaagttttggaatacattgagttcacaaggaaaggagaagatgtacaaagatttaggtttcccccatagaggaaaattgccttcctttttaaatggttgcatgctaattattcaaaacaatggttttatctatgacattttcatatatgtatatcatatacttggatatagtatctctctaattctctcttgctcttctctgtccctcctgttgattcccttcaattccaaatagcccccttctgctttcatatctgattttatttgaatatttttttccacagaagagaatgcatgcagtagttttcttttctgaatatggttatttcacttaacatgatgattgctagctccaccaactttcatttaaatgacttcattcttgattgttcagtaatacttaattgtgtatggacaccatctctttgtctgtttatccaatgatatacaccatcctactgcattgtcttcaataaagtcattccatggtaatttattttggtttatttttcttacaagtgaggcatgggttgagtaagatgatcgtaataatcaatctatgttctgagagtctatctgcatatttgggttacttgggttttgttttgggagtgtgtgtaaatgatcctaggttcttgtgcataataaaggagtactctagcacttaatgacaccattatgtatctatttggattttaatcctgctgacatctaaatcatttcataaacaactcgacattaagtatggtgagtccttttattttcttttaaatcttgtcttgtgttggttatgatggaaagcaagcactttgaaagtgaataattaggcttgggaatggaaatgaagggcctggaagatgaatttgtaagtggcaaagttttcatattttatataaatcctaggaggtcaagcatgatgcataagaaatcaccaggaatctttgatcctccatcattctttgaagttcatttagagatgttctgatgaaaatgggaaagctcagaaggaaagtaccaaataataatcatctctggatacatatttccatgagtatttttgatgtcaagaggacagccatagaggattttaaagagctgggtactctggagtcagaggcaggtggatcattgtgatttggagaccacactggtctacaagagctagttccaggacagcctccaaatccacagagaaaccctgcctcgaaccccacccccaaatagcttttaaagaaaaataaactcagttttcagtcatctgtatctggggtttcttttgaatttgtgacaactaaggtacttgtggataaagtatttgttaatgagattgttcctaaattatcacagcttgaaaatcaactatctcaatcatcaatgttcttattttggggcctgagattgttttgcctgtaaattgggaagcttgagctatttgatttataaaaactccttttaattttaatatcttatgagaacctacaaaaaatttcagatctaaaatatgtaaagtgagagcagaaaaagcagtgataaaatgagaagaattctgaatcagagggagcttttccaaagttctttctaaggacacatttagagccactagttgtttcaaagctttgaaatggcttatgacctacccaagaagatttagctatgagaacttatattcagacataaaagctaaacttctcagggccccatcgcaatcataggtcatgactttttgtctcaaagagccaggtatccatttatagtagttatacaaaaaggtgacttggaagaagacttggaagaagagagtgctaatgtttgtaattaattcacacagggtcatgtccttgttcgattgtctaaggctaagcaagtgatactatcagtgagtaaggtgagttaaactcatcaccagggactgtgctgatacataataaaatgtgaagccacttggtcagggttagtaagaattttctgccacaatctacttattctgtagctttggtgacacccataagcacatctccttcaatttgagagactgtaagaaaaaatgctgacagagacatgcaaatcccccaataattctaaattatggagttccagaacagccagggatacatagagaaaccccacccaaaattattttatgtctatgggtatttgtttgtatgtgtgtatatgcaccatatgtatgcttggtgcccgttgaggatagaagggagtattagatttttggaactggagttatagatgattctgagatgccatatgggtgctgggaattgaatctgggtcctgtagaggatcaactagtgctcttaactcctgagccacttctacaatctctattcttactattaatgcacctgtgttgggaagaagtatgtaccccagtgtgcatgtggaagtcaggaagtagctatatggagtgttcttttcatccacctttatgtgtgttttggagattgactcactctcactttacaaggcttgaatggcaagcacatttgtacacagaatcatctcattggcttcaatgtgcctatttatgaggtatgatatgatatttttaatgtattttagaatgattcaatgttcgtaattatataggtgaagttcattgaacttatttaattttcctgaaaacagggctccaatcacctgagcaactgattatccaatacctaggggtggtgaggcaaatgaatatactcaacactgctttggaaatagaactttagggactcagctatgggatctacttcatgactctagaggcagtttttcatagaacagatgctatcttcttacagttccccaaggaaccatctggaaggatgctatttctacaaattacaacccaaaacatttcccagtagaagtatttgtgaggagaaagtcacactgtgtcctaaaggtgccaaatacagaggtgaatcatatataatcataatcatgcataaaatcataattaaaaacaaaagattctgtgttttattaaattaattactgctttcctgtttggcatttggacaatttctgagcctctttaaatctttactgtctaaagggtacccctccccatgaataccagtctactaaagaaatggaaggtccctgcttaaatgcttttaggaatttgagggttaaattcaatgtgttttctcaatcagagtactttataatgcagttatagagtatgattttctatgtaaagaacaaatagcaaaacattggatttaagtgtgtgggaacattaaaaccatgtacctgaaacatctgcctcagacacctgagaacatgtcagagccttctgttattctcaggctttgcttcacattgtagtcatcagtgaatgtaaacaaaatatgctggtatctggctcctatactcagacattctgatttaattattacacactcaaatatgaacctctggattttaaaagctcccaaacggattcttaatgacagtgtaattaaagcataactattctagagtctccatgtattgtccatgttcaggagagtctcagtcaaatcagtgaagacctttgcaggtcattgttatgatgttttctgtcttcatatttgaaaatttatttataagaaggatgtagaccatgggacttggaacttttagtttgtggcaccacacacagggagtaaagtagtactagactcccagagaaatcttttcaggaattgtcttcagatatgttttggaggattacttgtatgagaatgtattgagattatcatgaacaatatagatatctacttcctatgatggatacaccatgacagaatccatggaggtagttttttttttttttttttagtattcacccttcagagagtttttgagaatttctcatatactttgaattttcagaccagagatgtggtgaaggctgtagtcatcctggggaattttctaaaatttccttatagacattagtaacttcactgcctactcactcctgaactccataatacttgtgaatactagtgaatcctcatttgattcactctatgcttttttgaactgaaatatattaattaacaaattaatgagtttcactctctcttctctgtatctcttgaaccaaggtcttgatgtaatttggtttccatgtgtggccttgaattcccaatagttaggagccaatagctctgccttctgagctctgaaattacaggtgtccacaccacatataccttggcattttatatatgtatataatatgctttgatcatatccactaagcagtgaactttcacagtcacatatatcatcagcatgccatggtcatggcaagcaagagctcatccttaagaaagaacatcattttccaatcaagtcatagttggttagaatggcatccaagtgatatcttccaaaaatatattctttctgtgcaaagcaggaagaagacaagtctaggaacaagttatttattacactgtgcagagagttggcaagacatgtcatgggaatttgagagtttgaaattagagagctactttcaaagatattagataccttattaggaagtcacaaaatcaccttccctagagagttaccccaggagctaattagacttcagcactttgacagtgactacaagataagatgcatatcaagcttcttatattcagaacacttggaatagaaggtttagggatacttgctggtcccctgcgacatactattgtggtaggaatctgaagcaatctcaggaaactggggccaaggatattgatttggtaatgttcagagggaagagaggttaagacataaaagaactgggtgtcacccatctcaatcatagtggtggtgtgactatgagaaagtgctgcatttttagcaaggagaagaaagtaaagggaattaaagacagaaatgaagtatgacttgcctacatccctgcatggtgaactggatgcatgaaccacctggaacagcaggccacaaatagcaacaccacaacaagaaaggcaccagcaaaattcaggtaaagaaaactcataatctgtgtatctacattcttgttttctttgttgctaactcctacagattagttcatcgctgggctgactctagcagcatttgttgttcaaattaccaaagtcattcttttcagccttgttgaagaactttttcaagggctacataagccattcattcagacttcctcactagggttcattaatactagattgcagaatagtttgttttattctcctttcaaatatatatgttgtttattattaaactactgttatcttaaggctttgagaacaatcaaccaatcatcatggggttttgtaagatatttgtaggaattcagtgtctactctcttggttgtaaggctaaagcctgtgtgtgtgtgtgtgtgtgtgtgtgtgtgtgtgtgtgtgtgtgtgtatgtgtatgtgtgtgtgtgtatagagtctttatccagtttgaaatagaacaacagctgtctataaagaattcatgcagttaaactgaaaacagaaatatttctacaagcagagtctattgctgattaataatgcagatattttgtctcatgctgttttgtttacagaatatagaatgctcatttggacaatactggtgaaagaaatttgctggttactcaacataatttcattaattggtatgccacatttggaaagaagacatttcaaggaattaaaagttaccatatacccttaagaagaaatatgacatatattctaatccctttgatgattagcatacaatattattattatgatgagttctcattgtgttacttatgcaaaaatgttaggcactcaaaagttccggggattagacacaaatttagacacaagcttattcttgggagcatccctttgtgttacttgttttgggagacagggattaaatctctggtagttcacctctatgacaataattgaaccaagaagatttctaaatatactgctgagagcagtgcatctccaaggctttttaggtgtgtacactacagaaacacagctgcactgatactttaaacacttaggatgatatggtctaggaaccctaaagcctctattttgaaattcatggcctctggtgtctaccatcaaagacatatctaacaaattttcatatacagaagttttgtttttattattccttagctatattgttcttctttggaagaaatatatgtgtgcatgacttttctagaagaaatgatagttcaattatcatattcattagtgttttacactattttttcacttgaaagacaaatttaatttgtcatgaaatttcattgcaaagaaaatcttgcatgaagtgacagtggttattgaaaattaaataagaagaatctaacagaagatgctcatttaaaattttaaacaagcaattctatgcctatgtagtggttttagtttttcagagtccttctgcatccgttttaatacacatatcaaccaataggcacataggtatattagccttttgatagaagaaggaattgaggtacagaaagtttaagggctacatatagcataaagtgcctaattggagaacagttgcaaatacaacatttaggttgtcaatccaagaatcacttactccccattcttactagaatagaaacatgcataatgtattaatttatcttagagtgagctctgaatttctctaagtcttccttggtctacaaactttgttgtagtcaaagactacatgtcagagactcagtttaaactctattacttaagtgacttattcttctcttgtgagtttctcttctttggatcttgtcttagcccacacaggtaaacctctacatggatggcaggaaggaattacacatttgtaactgagttctttctgactgcattcactgaacatcctgagtggaggctccctctcttccttttatttttgagtttctacctctctactctgctggggaatgccggaatgatcatccttatccagaagaaccgtagacttcaaaccccaatgtatttcttcctcagccacctttcctttgtggacatctgctactcctctgttatcatccctcagatgctggctgtactatgggaacatggcacaaccatctctcaagctcgctgtgcagctcagttcttcctttttaccttctttgcttccattgactgctacctcttggcaatcatggcctatgaccgctatgtggctgtgtgccaaccgttgctttatgtcactattatgacagagaaggcccgtataggcttggtaactggggcatatgtggctggtttttctagtggttttattcggactgtcacagcctttactctctccttttgtggaagcaatgagatcaacttcattttctgtgacctccctcctctgttaaaacttgtgtgtggggacagctacattcaagaagtggtgattattgtctttgccatatttgtcatgcctgcttgcattgtggtgatctctgtgtcctatcttttcatcattgtggccatcatgcagatccgctctgctggaggcagggccaagacattctccacctgtacctcccacctcactgctgtagctctcttcttcggtacccttatcttcatgtacctgagagataatgcagaccagccttctgagggggacagagttgtatctgtgttttatacagtggtgaccccattactaaatccactcatctatagcttgaggaataaagaggtaaaagaagcccttatgaaatctctgacatcaaagatttctggaaggccctgatttatttctagaaggcctttatcaagcaacatcgatcctttgcttctatgtttatttttttcctcaaacatcactcagtttggaaggcttccttaaactcaaaattggaatcaaacatcccacctccactttctgacttattattctatgtattacttgttatcatttaaaagatgagatgttttatgtttctgatatttacctaaagttacaattagtaagtagatgacatgagaagggaacatttttttcgatccctgtgcttaacacacaaataatctacaaatataaaaatttggtacatttttattacatgagtgaatttttcccagatttcaatgttgaagtttgttttccaacttacttagcccttagtttacttggagttcagagggttaaatcatttgacaaagttatatttttgaagatccaatttttgaatatccaggtgctgggagccatgtggcctagttttagcccagtatatgagtgcttcatgtctccagatgaggcaacatgtctccagatgaggcaaagcctacagggacagtcacactcagcaaggaccagtggactatggaacagcacataatactgctaggcctatgcagcctgcatgttattgtctttctaataatattgatgattctcttggtggtttttattgtcattatgtcagtcacacatggaacagatgggatcattcctggaaacactgattgatttttctcaaatattttcccctaaaattctttgggagctgatgcttctcaggctttttgtcctgggatgttagttgtcaccctggactctgggaactgtcttgattcaatgctttcaggattgaaggcaattcaaacctatttctgtaaatacactttgttaagttgtgaacactattgttattcttgaaaatgtatgcctatgtttgtaacaataactatttccacaagctgcctgggttctgctgctgctttagggcccttaaataatacacagagtcttatattagtcacagtgctgctggcaatgactaggatctcttatttgctagctcagttttaattaacaaccataactactaatctatatattttttaaggacttatcttatctaggatgctggcttcctgggatcacatggtgactctctttactacatttcccagaatcctccttatctcctagtcctgcctaacttgcttccctattggccaacattgttttgttcattaaccaataagagagacacatacatagaaggacttcccccatcatatgcttctcactttttagttatgtaaagacagggtgcacctggttcaatatttggccaagctagaaaaatgataaataatattttttgcttaaaagatgttttgatataaaagttgggaaaacatatttcacttatttatttttgccagaagttaatcttgggaaaaacattattagtatggtaaaacatgtttgtttttgatgtgtaaataaagacggcttaagctattcagggccagtcacttgtgtgaaattcatctggtgatcagataatacttcatttcttctgcttgctaagaaatttcatggtaagacatataacaagtatttcaggagagtatttgatggatgtgcttcagaaagaataaggggggaatttcacttatgaatgacaccagaatctatgcatgagcttttgttcctgtctttctatggatcacctaaacaatgtagattggggaggagtgacctcacatggtgtatccttgaagttatttttctccaaacgtcaactgctacatacctgggccaggtgtgtgtgtgtgtgtgtgtgtgtgtgtgtgtgtgtgtgtgatttgtccatgaaacaattgggaacctagaagaatggaaaagttcctagtaaattctgccactattattgtagtaattatccagcttcttaatcaccattaatattaatagatagggggatcagtttgtctctttattttggaattattttggacagtttcttcaatgtccaatttcactttggatgattatattttctccaaaagtggaaaacttaataatgatttaattattgagctaatatgtctctatcacatatagggtactatgctaaaacatttacatgagtcatttattttactcccctaaaaaaacatgacccaaagtaattgtatcaatcccacttagcaaagaataaaagacccaaagcacagaaggaactaaaaagtccagaaggttgatatgatttcaagaaaataagtagcaagaaagtggcagaggaggtaggttctgatctcaggtttccagaatctaacttaaatgatttttgaccctcatgcatgctactttttttctccaacacctcacagcttagtagtatctggatttaaattttactactgatctcagtggtgatttaaacaaaatcccaaattttcaaatttactgataaaaattcaggagccagatgctggggtgaaagcctgctagttcagagaggcagagaaagcactcagctgaccttgctcctccaccaacatcccagaagcctccttgttctgtgctatctctaacaagctcttcaagctaaaatgcccccctttacttcctgtgcatctccctctgtgtcctcttgactactttttattctctgttttttttttcttaatcatcctatggtcacttcctgtcaacaggttccttgctcagcctcttgatctattgttgtatttatttaatcctgcttacaacattcattcccttggattaaagatatgttataggtctgagccacattacaactagaagaaggttttccagtaaataatgtagtccttgggttcagagtatgataaaaaatcctgcaacactcccccatttagtctaaataaacagaaaatgtttcaactttatacagtgaaacagttcatgaaagggaaatatttctgccaaactttccacaatgtccagcttggttgtatttgacattcttcagattaagtatttttgaacttaaagttctgtaaaatgttagtgtcagtctcagatgaatttaggaatttgaatgtcctgaacagtttgcagaccaatgctgatttttgagtggtgttcatcagattagtggcaattctggctaagtagaacacgactgtcaacacaaaagtgtttattatttgtgcagaaccttgtaacagtttatcatagtggtaagctttaccacaatacaggtggattcatcattgcaggaccccatcgtcttcttggagacctcaaaggttactgttaggaatggtcatggtttttgtagaaaacttaaacatatcaaatgccacatactgcatatctctgacaggtttgaggaccgcatctgagtcacacaaacttagtccttagttgctgcttcacactcaaacctgagaacacatacaggaagttagatgaagcttatttccagaattagttactagtctatatgactaatagtatcaggaatatatatattcttatgatcttattgattttgagatatttataccttaagaaaaattttagagagtcaaataaaaaccaaaagaatatgagattagtggcaatagaatagtcccctatttttcattttcttctgttccatacaaggtgtctctcctgatataggacagaaattttggattttcttttaacaagcatgtatgggtttagagaaggtctttagagccatgctcctagcccaaagacagctttaattttgttttgaagtaggaccacataaagaccatttgccatttatgtctgtagagggcagcagagacaagacttgggaatttgccaagagtaggctcactatctggctggaagaaggaaaagagagccactcaggttatcctgtcccaggcacatattaggtagttgttcagttagaagtggaagccactcctgcaagatgaaggcatgtgtgctgatgttattctgcggctctgagctaggatttcaggctggttagctggaggttggcaaaaccacttggccaatttactatttttcatgggacatttttctattgatgatctgtctttttacttcaaatgtttcacttgtccagtagtccctggatttcttagttggacatttctattctcttggaaaggaaccccctgcctcaaccctaaatctggggttcctttttgggcaggttatatctttcctggggcaaaatggttttgttttttttggggggggcatttttgacaacagaaaaagtattaccttttaatttaattttttttaaaatttggaactaaatatactttagtatgtctgggtaagtgtacctacatccccatttggtgggagatgtccttctgtatgctgtgaatatatatttctctcattggttgatgaataaatctgttttggccaatgaccaggcagaatgtagtcaggcaggaagtatacgtgggatagaagactaggagagttctgggaagaggaatgtggagagtgagttgccagggagatgccatgtagctacctggaaagtaggatacctggcattctctggtaaaccaagaccacatggaaatacatagattaatagaactgggttaataattaagaaagagctagtcaataagaagccagagacattggcccaagagtttataattaatataagcctctgtgtgtttatttggaactaaacagctgcgggaccacacaggacagaaacttccatccacaaccctttcttttcatatataaattgaaatttaaagtgcatttatttttagatcataaaggataaattgaatttcagcctgtcttttgcaagtggcttctaaatttaagtaactgcaattcttatgtgtctggctctgcctcccaagtgttgtaattaaagatatgtgcctcaaaagtgctgggttaaaggtgtggaccaattcctgcctatggattccttttaatagttattctcatagggtttcctggtttaatttggttttccatttcacattatttttttaatgttaatggtaaactttcaagttttaaaatgggttacctatcattttgactgatttattctgaatttgttccctggcaaaatttaatattctagtctcaattaacatgatgccaatttgtctactacttcattattttcagatgtttttgtctgtcttgcctatgtgagctacattacatttgatgtctttgttaagttttgctagattttgccatttctttccatgtctaacatgtccagatatctttgccatttatctgtcacttaatgggttttcacttgatgatcatataactatagtagtgcacacatactgtaaactggagaagataggtgagattttcctatattttttctagttgtttgatttaaaaccaataatgctgcacttattttgtggttccttcctcagtaataagcattccattccctggtctatagttgactgctttctattagttttggttcccttagtgtttgatgaaccatcagcaaacctaggaatagccaaatattgtgacttctattgtacatcatagtccaatagtgcttcttttgggggaggtgtgatcagtttaaagacggggattataggcaactgagctatttcctcagtgtagaaaggcacagacacctttgctaccacatgctggtaattaagggattcaggtaggtatcagctctattataacacctttccttccatagctaagcctatgaaggactctgtctctgaacacatccaatgcaccattgtaaggggtagctttgtgatcatagagtaggtggaaatgattgagtgttctagtaagcccctagagggcttttacaatcatctgtaaatactggaagtgattcctctagtttgcaaatatatcaattaggagttctatctaagttgtgtcctgggattgtgggatcaaagcttttgccaccaccagcttattcactgtaactctagaattgagaaaacaacaatgtctgtgagccgagagatataggccctctgttcctagaactaggttgtagccatgagctgagaggagttctaggaaaagcccacaagcttcatgagtttggttggcaactgaagattgtttagaaaagctacaactgaaaaatcccacacttgctcaaagacttgaggatagaacaaaagaaagcctagctggtagggcagggactctgctgggagggactcaggtgggggtcccaactatagatcaggcttagtccttggcttgttgtctcaaagcagttttttgttaatttttacctttaggttgtgcaccaatatgttgtacaaaaaataaaggaaccagagactgatactgggattcaaacttcaagctgaaggtcagaaaagcaaagtacctggcaagtagcttttagcactattttaggcttaaagggctaatcctgttgcctttcctccacttggctggcaaatcctgagactgtatgttttcctatcctcagtgtggctggagaatcaatgcctgacactgagaccttgctcctgccttatatacctccctaatgctgggattaatgatgtgcaatcctaggtgttgagatcatccttatgtgagctgtttctctttaggatgctagcaatcttgtgcagatcttctgcttctattgtgtggaacaatttgagaaaaactggtattagctcttcaaattttctctaaacatgttatttcttatgtgagtctgagacttcaagcacattttctcccaatacctgatcaattttctcatctccccgtgctagagggactggtagaattgtatgggatcttatatgtgttatagataatggataatttctatttgtgattacttgttgtagtgaataaatagcaaagttaattctgactaatctagaataagatcagcagttcaatatgtaaaacaactatttctgcatgttgagagtaagtaactatattgagagattcagtaaaatctaataataccgtaaggatggcatgcagcctcttattttttgacttttaacctacctttcctgatttatttgcatcactgtaaaatgtaaaggctccaaaaatttatgtcctttttactgtatgagagatgacccaattcgttctttttataaactgaaatcccttccatctgtgatatttgttgctaatctctcccaacaaattactgtaagttctttgccaatattcattttctgtctataaagaggcaatttcagcattagtaaaaggtactagtatttctgctgtgtctattcctgctattaatgaagtcacatttttcctgatagaatcaattcagaaagttttctatataagttttaattttttatttggcttgtgtgataaatgtatccattctaaaatattatcttctttttgcataaaattccctttggagaatgagtaaaagacaaaataactaatgtacaatcaagctctagattgtaatttgttttctaccagagccaattcactctcagtcttagctgacaatttatgtaaactacttaaatccttatccccttgtgaggtttgagatacattacttagcttttgagtagttgatcaaattatgggccatagccagttaatatctctgagtaatttttgtaaatcattaagagtttgtagttgatctctcatggtttttacttactgtggtccaattttatgtaaatctatgttatatcttagataatcgatagaatcccctctttgcatttttttcaggagatatttgtaatccccagcaatgcaaaattctttgtacttcatcaaacctttgtcctaaggtatctgcatctgaatcaaccagtaagatatcatttgtataatgatacatttcagtttgaggaaactgtttacaatttttctaatggttgccgtgttatataaaatattaacacaaggtggggctgtttagcagttcttgatgagaaattttccactggtacccttttaaaaggttgaatattattataagtaggcactgtgaaggcaaatttttctgtatgctgttcttgtaaagatatagttaaaactattctttcaaatcaatcagtgtaatagcccattccttagctaataaaggtaaaatattccaggctgtaaagagcccattgtctgactcactttatggctcttaaatctcttaatggtctccatttttcagatttctttttaatgaccaatagaggagtattctaaggacttgtctattgttcagtatgttgggcatttagctgctcctataacagctgtcttagtggctgtaatttttctgatgtcaaaggcaaatgttgcccccacttcaggtttgtcagttaaccattttaaaggttgatacctttgaaagaccatcagctgatgtgtcctgctcatgaagaacctgaatgatctgtgactgtttttgttaatatcctttaatatttttctcagaagctttctgtagtttatggtttgtttctgagactggaggactattaacctatttttccattcctgcaacaaatcagatacccataaattcatagctatattagatacatacggcttttactttccaattttttccttctggccctatatactcgacttattttgctctttgttttgcctaagataaagttccaatccctagaaactgaatatttacctggttaaaaggccaatttggatgtcaatattttggagaaactattgttaatctgatcctctgtcaaatgaacctacatttgcaataccatttatgtgtatttataggttaggtctttgatcattagagcagtttacaaaatacacaaaaaccaaaaaccaaaaccaaacaaacaaacaaaatttctctcctggacttctgttttatatactgaagctattctatcattgattacattcagagtagtattattttcaacaataggcattaaatcttttcattgctgtgtggatgagtttttcttatgataacaaggaatgaatgaatcatatttgatatcagggcctgtgggaggcactttaggcctttcctgatggcaaagggttaccttgcctgtctctccttgctctgcattcattagcagaattctaacctttaccccaccttctgcatattccagaatgcttgtgccttccatttaaattttctctaaaaaaagaacattgttacttggaattccttgcataaaatatcttctcaagtgacattgcttatgacaagtatagcacctgacattttgatgttttttaagatatttagaaatcacttcacttaacaaagtagtatagtaacatgagatctaatatcagcctatttctaatccattcacctattggtgctgatattgcctttaaagacccaatcagccatttgcactctgaattagcccttacaaaagcacaggattctattaatatttgtttaacttctgagtctgatagtattctatttacagctgtagttactttttgcaaaaaacaaaaatcttttggaccttgtataattttagcaaatgactgattcaggcctctttcctgattctccaaccttattccaagcatttaaagctgctaaatgacacagtaccaaggtatgatcattcaattcaagctgcctttgtaattcagcatgttgaccttcacctagcaactgatctttttgaaatattaatacttctaatccaattttcttgttctatgaccctagcttcctctttccaccatgtttaccatgtaactgaagaccagtttcctatatttctattgccaaatctttccagtcttggggaataattctgttctgagttgcccgtgaatttaacatctgcttaacatagggtgaatgcatgccatatgaaatgactgctttctgaaatctctaatcaaatatttctatgggattccatttaacaacactcatgtttatatgaaattcactaaggatattcaatacactactaaaatgtgcacaaagtttgcatggaggtgtgttagcaaatgggagagtttgcaggagctaattgaggggggtaatcatgatacattatatgcatgtataaattattcaaataataaaatagagagacacaagcacatggaatcaggatatgaataaagaagtatatgatgtttacatcttctctaaaacctattctgaagtaacttttacttgttagatgtagaaattgaacacactacttgacagatagttggaatgctagcagatcaaaagtttaattttctttttaattttttatcccctgaaagttttgtacatttatgtattttaatcacatcaatctactactatatcctaccaaatttgcatctatctcccagcttcttgtcttctttttatttatttagtttcctatcaataactcactgattccaattagtgctgttcgtatgcccatgtgtttagccatccactggagaatgagcaacccacttttatgcttatgatttgtttcatgtattctgacataagagacaagaggagagcatttgtcttaatttacatttatcctcaatagggtactggaattttttgtttagtgaaataatataaaaatatttgtgatatttcacacatctagttttattgataatttctgtccaaggtgaattgttctgcaacttttgtggagagcttctcttccatttgtgtaaattatagtcagatgacagaggttatttgtgttgtgtttacaaagcacagataggttttcctcagcatggctatcacagtagactaagatcaggattaaacacaaactttatatactctttatttacacttcctttattaatcactttagtaatggaccaaatgctgcctttgcttattgatgttaaaattaaataaaattatatttgctttttctatttggtttggtaatacaatgatactgtaggatatttattctcttagtgccaaggacacatgtagagactggtaaataaaaagttcttggatgtttgttgaaaatggtgagttgaataatgattcagagaaatataaacatttagacttatccaggacttattttccatgacaatttatccaggtcattatggtaatttataaaactatatctttcaatttcacatttttaggcaaacccataacttgtatacaactctattactggtccaattaggcttttcatgtcttgcgactcactacaaatagagcatagtttctaatcttgcacagaatctatatattaggggatatagaataataggtcaggcccatagggatacaaactaatttaaatcatatttcctagacaaacaagcataaaataaaagtacctggctcatggacaggatgatttgttgattcaggtgaggcttggaaaataatgataaaatctttcttgaaatctttttcaccctaataaatgtttagcagtttgaactttggttaaagctacactgcaattaatttcccattatgagaaacctaattgatgaaaaacctatgcttactgaggtgcacctacacctgaaagtacatagtctaaaatcctgacctgaagtgtctctggcttgagttggtcaaccctctatctttcctttaaatttatattttttaaatttatttactcatttttagtttttaaattttgttccagtatagtctaatcgtatccttttccctcccgcaacttctcccagattctctacctttctcattcaaccatcttcattcaccatcctcttttaatcatgcatatcttaggtgtggaataaataggatattacaaaagatatgaagcttcccgtgtaagtcaacatatttaaatagcaaataattaccaaaatttttagtagtatacattataatgatatttatatttgtgttgtgacttaccatgtacataaggataagatatctaacacaacaactcttataaagctacccacacctcagaggttgaagtaggagacagttgggcagatacaaaaaaggttcacagagttgaatcatcataactattctacaaactcttggctctgtcattcatcaagttttgcagatcaaaaaaggtcagatggtcatgccatcaaagggaggaaatgtcttttattgatgagctttttcagggcatctttcatgtccttattcctcaggctatagataaaggggttcatcatgggtgtcaccacagtgaagagtactgcaccaatcttgtctgtgtcctctgggtgagtggatgaagggaaaaagtaaacccctactatagtcccatagaagagtattacaactgtcaggtgagaaccacaggtagaaaaggccttccactttccctctgtggatgaaattctcagtacatccctgatgatgcagacataggagaagaggataagggcaaagggaaaggtgatgactgataaacccacaataaattttacaagttcattgatcattgcatctgagcaggaaagtttgagcagaggggccaagtcacagaagaagtgctgaatggtgttgtggttacagaaaaccaattgattggccagaagagtatgtgtcagggcaacaatattgctgagaacccatgggcaaaccgtgagcaaaagacagaacctagagtgcatgatgattgcataattcagagggtgacagatagccacaaatcggtcataagccatgacccccaagagaaaattatcaatgacaacaaatacaatagaaaagtacatctgtgtgatgcagccctcataggaaatggattgactcttggtgtgaatattcgttagcattttggggactgaggtggaagaggaagaaatatcagcaaaggataggttggcaaggaagagatacatgggtgtgtgaagatgtgtatccaaaccaatggccagaatgattagcccatttccaactacagtgaccaggtacatactcagaaaaagcacaaagatgaatttctccttctcaacctggttggagagaccaaggaggatgaattcagtgatggtggtttggtttccttggttcatatttctgttaatctgaagaaaagaaaataaattcataaactccaaaggcaagcaagcaggcaagcaaacaaacaaaaccccaaatagtatcatttacctgcagctagtttgtgcatgatacttccatgatgctgaatgtgaatgaatttccttctgtggttaagtagaaaggctccttactaaagacttacctgagcagtgcagaggctaagaaaattcctcagcaacacaggggaaaagttccatcattagtgtattctttaaagaatttgtgtgaaactttaaaatgggacttttaaaatcttcaaatcactagatcaaccacaagtggtcaaaatttattttcagcctacaagttgtcacccagagacaggggagattagtcaagtttatttttcttgggaccttggtctctcgctttcttttctcctggtagaactttagcatcacccatctcctttctgtatctgtctctcctctctctcttttgtgtccctcttcatgtcactgtctctcaaatagttctttccctacagaagagacaggaaacaattaccattgggattctggaaaactgacgtgtagtagggagaggaaaatatctgaggacttgtaaatttggagaaacacagcttgcaaattagacaggaaaaatccaaaatggagactgcatgagaaaactgaaatgaggtaaaaagctgacaggtatctgcaactgacatagagacaagcctgagatggtcctatgtttataggacctggggtggtttgggttttcctaggatgggaatttgtatgattttgggtgactgattttaacctcagcttcctagtctacctctcccagcaatcatcaatcttgcacaatgtgttctaaatccccatggtagctttctcaatggttaagaccaaggttaaattctaagatgctcacctgtgaatgaaaggaaaaaattatccacagggttttttttttgtagtgttgcatttgtgacagtggaagtggatagtgaaagcagtcctcctgtgcttctcggttaatgctttcatgatgctggactcacatgggacattcagctcatcccaagtccacagggacaacatcccctgaagtgttttcttcaagacaaacagtaatttagacataatagtttgcataggtaaatggaatagacagacaattgcctttttgctttgtctctacgtcctcattctatgttgagatgtccttcttgtaacttaattggtcattactatgtaaagcaaatgaattgttgactgtagcatgtttctttgtttgcttccattagtctaggagcattttgagattcccttcattgttcatttgtgcttcctggtaaacaggaacacttagtcaataccctgagaattgtattcctttatcactgggactcctctagtgagatgacatctgtattaggaggaggccatggtccctacaatgtttaaagaatatcagcattagaggagagtcacaataccacattgaataccaagtaattcagacactaaacttcttttataacttttattcattctttgtggatttcacattattcgttctgctccgcttatctccttgtcccctcaaatcaaccctctgcctttctgacattcctccctaaacaaaaccaaatttaaaagcataaccaaacaaaacaaggaaccaaaacaaaaataaaagcaaaacccagaatgaacaatagcagcaaaaatttggaagaatcaagtgtggcttggtgagtcacacagtttacatataccttttaagtgttcattgctatggtctggtttgagacctctgatttctgccaaactaccagtaatgggttctcactcaggctactcttggatatcctgttgttgtcctgtgttatggagatcttgctgtttttggtttgtaggcttgttttcttcacatgctccaacaatttatatattcagtggatgttggggtggaccgctgtggaataattcttttgtacactgtgaaaatgtgttgctcgaattgttaataagctgattggctaatagataggcaggatttggtgggggatgctgggaagacagacagagtctgaggagtctctagccagactcagaagaagcaacatgtgaagttcacagatgagccttgggtggaataaaaattaacataaacgggttaatttaagttgaaagagctggctggagataagcctaagctatcagctaagcatttataataaatattaagtttctatgtggtttatttgaggagtggcaggtggaatagaaaagtccacatagagagggtcaactcatagccctggttctgggcctggatggtaagtgggttggtcagctctctagatttccttcattgtcactatccagatgagctctccacccctgccttgggtagctcacccaatacagcctacaacaaggatcagggacagttcttctgttcttgcaccctaagatccaagactcctcattcatatcacacatggacagttctactgttttggacagtcaaggtgcagagccctctctcctgattgctgtggacagttctactgttttggacaggcaaggcgcagaaacctctctcctgattgctgtagggagggtatgtggggggcagggtcatctatccttgtctctggccctcaaggcttgctcacttgtgacttcaacaacagggtcatctttagtgtgctgtacagatgggaagcaaaggctgcttcctcatacactgtagccagtgtgggtcagggctagctctcctactcttgtgaccccagagccagctctctcacctgatgcaggtggtaacaggggagtggggagggcatctttccttcatccatggcaccacatggtaaatgagggggttgggtcaattctccttctctcatgtccttaaggatgctcacctgtgtacctgaccacagggtcagctctagtgtgcttcccaggtgaggtgcatttcaattgtgagtgctgtgtcatctttcctgagtctggaggtgagctctcccatgaggggtaaggcaagctcacctgttgtaatatctgccagggccaggactgcccatcccaggaccagtgaagagcaggactggcatggttccaatgattcccatgttaacactggccatggataccaccacagaccctagctgtagcagagccacagacccagtcatgaccctcagcagcagcttgcgcccatataccaccatggtctaggtggcagcacaggtccctcagatcagcatggtctcagcagcagtatggcccctgaacatcaacattttcccaaaataccccaggtatccatagagcccttactggcaactggagtcatagacaccatctacaccacagcctccacagggccgaagacccagacatagctctaggcagtggattcaggtggcagcaccagccacccagatcaccatggctctgggtgtggcacaattcttggatactaacatggtctgaggtggcaaactagacgctggtccttagaatagcccttgttgacaacaggagcccaggacatcaactcagaccctggctactgtagggccatggactcagatatagccttatgcagtagccctggcctagatgacaccattgccttgagtgacagcacaggccacttatatcaggatgtctgtggtggcaacatgaccctcaaatgccagtatacctataggttgtaactcaaaccccaggcatttatttggcctttgctggcaacatgggccatgggcatcaatacagacccctagtaggatcagggatccagtcatgatcataggcagcaaccagggccagaatgtcactctggtcccaggtggcactgagtgcaggccctccaaattaacgatctctacagcaggattgccctcatatatcaacatgactccaggaggcatcctagacccctggcatcagaacagtattgaatggtctcatggtctcatcaacacagaccctagatgcagctgggtcatggacctagacatggcctttgccaacagccctccatccacatgataccatggcaccaggtgatagcactggccacccaaatcagcctgacattggcagtggcacagccctcagaaaacaacatgttcacaggttgctgcctaggctctaggcatccatgtgggccatggtggcaacatgggtcaggggcatcaacacagatcctggctgcaacaggacaaaggacccaaacatggccctcagcaacagcctaggttgtcaccatggccccccccagtggccatgaaggccacccagcttgatatggcccctgaggcagtacagccctcacacaccaacatggctccacaactggcccctgtacagcccccagtgatgaaagtagctgcttgaaggcagtcctgattaagacctggaccttggtcatagctcatatccatgcatctcccaggatgtgagtagccatctggcccttcatattagcccattcctcaccaccatgacctctgtagatccccctctctccccagcccacaaaccactccagctctccttctcttccacctccccaccttgtaatctctcaccacagtggtgcccaactgtcttgtaccagggcaattagttagtttagtactgcccatcacagaatggcaccaagttgttgcatttcctctcttccaagcagtgcttagagactttaggtattacttggcatgatgcagaccataaactcttaaattaaaaggacagaaataaagcctatgtttataatgttaaaataaactttgaaatgatattgaatactcgccgtgtactgagaggcctagaatacccaaatctgatgcagagagaaatatgaagggctgcacaggcagagacaaaggacaaatcagtagatcccctcttcttaatgcttgcatatgctttaaaatgtacttcaggcatttgtcttccaagcaagtggcattcattcacttttcacttggaatcaactcagtctgtgggctcactgtagacattcagatacatgaatatatgattaacatttaaaacaattagttgatagaaaataaaagataatccatgagtctatcaccagtctgtctatatgagacacaaaaaggaaacaagcattaaatttattaaatgtttatcttagtgcctgcactatttgtgttctgttcaggaagttttctcctgtgtcaatgtattcaaggttattcaccctctttctactcttttggaatcagtacacctggattcatgttgaggtctttgattcacatggacttgatatttgtgtagggtgatagatatggatctattttcattcttctacatgccgacatccaattgaaccagtaccatttgttgaagatgttttattttttccatggtataattctggcttctttctaatagaaaaacaaggtgtccttaggtgtgtgagtttgtctgggtctttgattttatttaattgatcaacatttctgtttttataccaatacaatgtggttttattactatagcttgaagtaggggattgtgatacctctgaaagttcttttattgtacaggactgttttagcgattctgaatttttgttttttacatgaagctcagtagtgttcttttaagatctgtaaagaattatgtttgagttttgatgggattgcattgaatctcctgattgtatttggtaagatggccaattttaccatgtcaactctattgacccaagagcatgggagatctttccatcctttgatagattctgtttctttctccaaacacttggagttcttgtcatacaggtctttaatttgcttggttagagttaaccccatttttttgttgttgttgttttttttgagacagggtttctctgtgtagctttggagcctgtcctggaactagctcttatagaccaggctggcctcgaactcacagagatctgctgcctctgcctcttgagtgctgggattaaaggtgtgaaccaccactgcctagctccccatttttttttttttttgtaattcttggttattgagaagggtgttgtttccctggtttctttctcaacccatttgtcatttgtatatagaagggttactgagttattttagttaatcttatacccacccactttgctgaagctgtttttcagctgtaggattttctggttagaattttttgggttgcttatacttaccatcatatcacttgcaattgaaaaatactttgatttcttcctttctaatgtgtattcttttaatctgcttcagctgtttctactggtgtaaaatatagctcaaccaatgattgatccagcttgatacccatgtagctcaagagagcctatccctgacccaacctggaggaccagaaatcagagaccagatggtcaagagaaacaaacatccatagtaaaaaatgtaaataaatgagtcctagtgatattctactatacatgtagacagcaacctggcatattcatcatcagacaggcttcatgtagcaactgatggaaagagatgcacagatccacaaccaaaaattaggcagatctcagagaatcctgtggaagaaggattgtaggagccagaagggccaagaacaccataagaaaatcaacaaacctaaactcataggagctcactgagacagaaccagtaatcagggaccctgtataggtctgatttaatccctctgcacatatgttacagttgcatagcttggtgtttttgtgagacttctaacaagggaagtgggggctgtttttgtcagcttttgggactcttttactcttttgggttgcctcagccttaatatgagaagagcatagtcttattgcaacttgacattccatgtttagttgatatccctggaaggcttgcccttttctgaaaggaaactgggggaaagtggctggggatgggagatgtggaaggggaggctgggaggaaaggaggggaaggaaaaggtgcttgagatgtgatatatatgagagaataaataaaaacacccccaaaagaaaaagacaaaaaccaaaacagaacaagaacccacctcccccaaaacccaacaaaccaaacagaaaagtttaaagtgagaaaagaataatgcaaaggagtgataaaatcctacatgactctttggatatgacatttttcatctgaaaatatggggtcaattgtatgccacataatttctcaccagttttataaataaaaaatgaaccacaattttgtaaaagaaaggctacatcatgatttaattcttgatatttcatatggaaaaacaaacttcagggaagtaaggagagagcatataataactaacagctacaaatccagtatagtatcctgtttaccttgacttattgttcataccaaacatttaagctgtagtggtcactcattggatctgtccactaagcatgtggttattgtgagaaaagaaactgtgcctgtagtagtccatgggaggggggaagaattaaacaaagcccacaacatagggcacctttgaattttcaggttgcatcatctggcccccaatagtatctattactgtgaatctggaaacaagcatagaaaattttaatatgggatcctagtattaatgtaggctatcttagaggacttgggaaggggcagcagaatcatagatgtgaaaggtttgttattagagagaaatagcagtacagactgcatcctatatagtctatgacatgtgctactctaatctactctcactcaggactatattttatagattaaatagtaaagtatagtgacttaattttccctgtcaggatgaaggcactctgaacatgaaacaaaaatctagtttgggcatatataatttaatttttatttattactgcaatatacattatcaagaaactttttatatcttttatcctcagtcctttctatcaccctcatggaattgaggactttgaaacaaaatgtaattgggctatagaaagcaatataatatctcttattcccctttacccccaggaaactagcataagacattgggaacaacatttctgttgagaatgctttatagactccttcaagatggtgaacaatcttagtctagcatgataaattacaaatatagtcaaatatagtacatatagtcctaactttggcagctgtttctgagctctgatttccttttccacacattcacgtttctccctttccataaagtatttttaggttttatcatacctagcacactcataggctgacctgggttatctttgagatgaggaattttctcctgtgggctacatattcttgtacatattctgggttgcagttgtggcaattactcattaaaatgcaatgtagcagttcagacttactttggtttagggtttaagatacaagaagcctcaattgtaaattgtataaactgcccttcgtagaagattgaggtaagccaatcccactatagcccattggctcataattttcattttatctgagactatttactgtacttatctggttgattcaataaaaaaatccagagtactctaacctcaaggtgttatacccacttacaacatgatgcgtttttttattctattagcctatcatttgtaattatttggtaaaaagatgaattatattttaattgggacaggatttaatcttatttatcaaaaaatggacccctttaacctcatgcaatttcccccatactctgaaggtgagaggtaaggttttctgaatcatagaatgatgcttctagaatcctgcagacatggatggataatcaatatctagttattctgactatatataagaacttgtaaaaaaagtttggaactattttctcaataatccttttactcataaagttatagaactagaagtaatcaaaatgataatttacataaaactctttgggcaaagtctagaagaagcccttcttctctaaatgtcatattttgggtcatcacaggtaatggagtgaattgaggagtcccagcaggcctaaatagtccccactctctgtgttctgtatccaacatactcttgggcttattgaatgatagcacatatccagaatgggcaaaagtgacaggattagaagacgataggtttaggttggaagaagatacatttactaggaaatctcgtttaaaaacacttttggtaagttggtgtcctttacttctcaccatattcctgaaatattacaatgtccaaaatgagtgggactattttctacaaaggcagagtctaaactgttcacttgttttacaatcacattcattctgtattatattgaggttaactttccacaagtacactcattttcagactatacaatgcacaaatttatgtagtcttatataaaagaattaagtttcttctcattttttttagttttggtgaaatgttctatagctatacattcagtgtgtttggtttataatgtctgttagctcaaatatttctctgtttgatttttggctaggtgacctgttcattagtgaaattgggacattgaagtctcacactataatgtgagggtcattgtgtgatttaagatttagtaatgtttcttttacaaatgtggtgtcattgtctttggagcacagatgttaactactgaaagatcatcttggtagagttttcctttaatgaatatgaagcatcattcccatctcttttgattacctgtgtatgtgtgcattcgtctctctctctctctctctctctctctctctctctctctctctctctctgtgtgtgtgtgtgtgtgtgtgtgtgtgtgtgtttgatggagacccccttctcaaccacagaacaaacagaccagacaaagagagagggaaaaaacaaacaaacaacaaaacacctatccaacaaagacaaattcagaaattgtcatttagacctatgatcaccccaaacccaggtgcctagacacaacataagaagataatcaataacagccaagaaaacatgtcaccaccagaccccagctatcctactacagcaagccctcaatatccaacaatatccaggacaataaaaatggacaataaaatgctttatgatcaactttttatctataatatgtcctatctgcaaaatatactaagacaagggtgtaaaaaaatcttgtgggagtagccaaccaaagtgtcttatttgacttaagctcctctccacaagatgagtcttatcccagatactggttgggtgaccaagagtcacaaactaaacagccaaaacacctagggtaaaaccaaatacaacttaattttttacaaagaaaaaataaaatgactcctagtgacaatctattatagtcatagatcagtgctttactcagccaacatcagagaaacttcctcctacatgagatgggaacaaatacagtgacccacagccagacattatacagagaatgaaaccttagtctatggaactctaaatggtatgtctccatccaatttctcccatcatagctaaggaaaccccatggaaaaaggggcaggatgagtttaggaataagagcagatagggctaccaggagaacaaagtcctctaaatcaactaagaaaagctcttatgaacttgtggagactgaagtagcaagcacagagctgacaccagtatacacaaggttctctgcatgaatgctatggctttcagtctagtatttttatgtgatacttgaatatgtgaatggggagggctctaatctcatgcttctcttgagactttttttctgctgtttgttttcccttgtttaatattgatgagatgttttatttatagtactttatagtacagttttatagtactatatttgttaaaaaataaagatacttcctgtctgaatacctgccagttcacctgctatgaacttcacttgctgtctgggtacctgcccaccctatctcaagtcctccttcaccccttctttataatcccaactcccaatttagacagagactaccttcttgactatatgccataccaggagccagaacaccagttagtccacctacccacagaccctctgtactctctcagtgttccccaacctatttccaatccaccaccctccttgtagctgtgtcccatcacccaactcagatggagaccctgtacttgaccagaagccatgccagacactaaaattataaccctaccctacttttgggacctcatgaaactttctccaatatcaaccatgaacctagtcataaaacaagtctcaacagatccaagaaaactgaaataacaccttgaatcctatcataccactgtggattaaaactgtatttcaacaacaacagaaatgcacacgatctgaaccattctctactccatgaaagcaagatcaagatagaaaaaaagaaattatatactttctataattcaatgaaaatgaatacacagcatactggaacttgtgggatacaatggaattgatgctgaggaaagtacatggcactaagtgcctatatatggatcaaagacctcaacataaatccaggcacagtgaacttattagaagagaaaataggaaatgtccttgaatgaattggtacaggagaccacttcctgaacataacactagtagcacagacactgagatcaacaattaataaacagacctcctgaaactgagaagcttctgtaaggcaaaggacacagtcagcaagacaaaatgacagcccacagactgggaaaagatattcaccaaccccacatctgacagagggctgatctccaaaatatacaaagaactcaagaagctcatctccaaaacagcaaataatccaattaaaaagtggggtacagaactaaatagacaattctcaatagaggaatctaaaatggctgaaagacacataagaaagtgttcaacatcctaagccatcagggaaatgcaaatcaaaacaactctgagataccatcttactctagtcagaatggctaaaatcaaaaacaccaaggacagttcatgctggagaggaggtggagaaaggggaacactcctccactactggtgggagtgccaactcgtacagccactttggaaatctgtatgatgattcctcaggaaaatgggaatcagtcttccacaagatccagcaattccactcttaggcatatacccaaaagaaggacattcatacaaccaggacatctgttcaaccatgctcatcatagcattatttgtaatagtcagaacctggaaacaacccagatgcccctcaactgaagaatggatagagaaaatgtagtacattgacacaatggagtactactcagcggggagaaaaaaagcaatggaatcttgaaattcacaggcaaatggatggaactagaggaaaccattctgagcgagggatcccagtcacaaaaagagaaacatggtatgtaatcacccatatgtggattttagatatagagtaaaggaaaaccagcctacaatccacactgccagagaagctagtaaacaaggactctaagagagacatacatggtcccctggagaaggggggagggacaagatctcctgagcaaattgggactatgggggggagggaagaaggaagtaagagaataagaaggggagaaaaggaggggtgaggaagacatgatggggcagggaggttgagttggaggttgaacagaagagagcaaggtaagagataatataatagagggagacattataggtttaaagagaaatcaggcactagggaaatgtctggagagctacaaagatgataccaactaacaatctgagcaacagaggagaggttaccttaaatgccctcttctgataatgagattgatgactacttcatatgccatcatatagccttcatccaacagctggtggaaatagaagcagacatccacagctaaaccttgaactgaactgaaatccagttgtagagaaggaggaggactgatgagcaaaggggtccataccaggctgatgagacccacagaaacagctgacctgaacaagggagagctcttggtccccagactgatagctggaaaactagcatgggactgatccagaccttctgaatatgggtgtcagtgaggagaccttggaatctatggggccccttgtagtggatcagtacttatccctagcataggaatagactttgggagcccatcccatatgaagggatactacctgagcctagacataagggggctggcctagccctataccaaaggaccttgaagaccccctatggaaggcctcaccctctatggggagcagaaagggtatgggataggtagggtgttagttgggggggaggtgaggaggggaaggagagggacctgggattaacatgtgttacaataaatctttctgccaaaagccactgcatcccatcgccatatgtatgctttatgccagtcacctgcccaaattagggcccaaattgctatatagagagacttgtattaggttcaaaactgcttggccaacaattagaatttctcattttttatctcagtcttaatttatcataaatctatatttttataagacttatcttatagaggatgtctttctttggcaccctctcttgccagtgactcatatggtgctgctggaacaggcaaaggggaaagggacatttcctgtttcttcttgcttaaatatgagtctccttgctatgtcaagtcctgcctggatcatcatttctctactatatttcccagaatcctctttgactcctagtgctatctaacttgctgtctcattggccaaacaatattttattcaataatcaataagatgaacatacacaatacattctccatcaaacatgtaaaataatctttctaattaaaagaaaaatattgagaaatgtttgaccagcaatgtaacagaacatctgaagactctacagtaaaaagaagtcaatatacccaatatggtcagatgaaactaaataagacaactgtttgctgaaataaataaaataaaaacaaatagaacagtataaagaatgaaaaaacaaagagtaggttctggagtattttctctgaatttgtcaaatgcaaatagactagacattgtgatgtatttattgcctatatatttatatacttattgtgtattgtttttcttacattagttataaccctttttattttagagaaagaggaaatgtggtgatattttgtttatggtctaacaaataaagctagcctgaagatcagagtgtaaagctagctatcctagttaggcttagcagccagacagtagtggtatacacctttaatcccagcacttgggagaccgaggcagatggatctctgatagttaaagaaaactttgagctaaatgaaattgatcctatctaaagagaaactgagttcacacaaagattaattcaatgcttgcgatactatgtctttaatcccagaacaagagaggaatataaggtgagaggtcagaagaactcagtgtagtcaggggtttggtcgagacagatgcagtctggagatgcagtgtgaggacaggatcaccccttttgtcttagcattggtagacatgagaactctctactggctggccactttgcatctctaatcttcagtcaagctttatttattagataataagcaaaatgtcaccacaaggttctttgagaaaataaaaaaggataggaaaacccttgtcttaaataagtaaaagatggaaagagaatatccaaattaacaaaatcagaaatgaaaggggaacataaaacagatagcaaggaattccaaacaatcattagatcatactttaaaaacttgtactccccaaattgtaaaatctgaaagaaatgttttcttgatagataacacctatcaaagttaaatcaagaaaagatcaaaatttaaattggcctataatcccaaaggaaatagaaatattcattaaaagtccctcccctgaaaaacagaaaacaaaacttgtgatttagcacagaattttaccagctttcaaattagagtcaaggccaatactcctcaaattattgcacacaatagaaacagaaggaaaacattaccaaatttattatgtgaggctacaggcaccctgatacccaaatcacacaatttgtcgaaaaaaatgaaattacagaccattttcctcatgaatacagatgcaaaaaatactcaataaaatacttgcaaaccaaatccaagaatacatctaaaatattatctactctgatcaactgggattcatcccagagaggcagggatggttcaacataaaaaaaataatcaatataatccacaagataaacaaactgaaagaaagaaaggaaggaaggaaggaaggaaggaaggaaggaaggaaggaaggaaggaagggaggaagacacaatcctttcattaggtagcaaaaacatatgtgacaaaatccaacacttcttcatgataaaacttttagaaagaatatagataaaaataacatacctggccataataaagacagtttatagtaagtcagcagtcaaaatcaaaataaatgaaaagaaactcaaaacaatttcactgaattcaggaagaagactcggctgctcacactccctatactattcaatacagtacttgaagttctagttagagcaataatacaactgaactaaatcatgggagtaaaaattgaaaaggaagaagccaaaatatcaatattcacagatgatatgatagtatacataagtggcccccaagtttctaccagggaaggccttcagtgaatttggtggataagattgagacagagtgcagagagtgcagaggtgagctgctctggcccctgccttgggcccaacttttgcctgcccactctgggaactcctgcccaagggtctggacacaggacgccttgacccctgaggaccaagcaacccagagtctgctgacatctctgcgccagtcctgctctcacccacttggagagcaagtgactcagacctgcctgcacccaacttgagacccatcagagtatcagaggcaactgtacccacctgaagagaacactggacccatacacaccaggaagggaagtgacaccacctgtcccactagaagaagatatgggaagatgacaatataagaacacatccaacaacaggaaatttgacaccaccagagtctagggactttacatcagcaagacatgaacatcccaacacagaagcagaagagagcaaccttaaaaacaacttcatgcagatgatagaggacctaagagaggaatcagaaaatccttcagagaaatggaagaaaagatgaaccaaaagatgcaagaaatcaaggaaagccaaaaaaaaaaaaaagccaagaaaatacaaataaacagctgaaggaaacagttcaggacctgaaaattgaaatagagacaataaagaaaacacaaactgagggaatgctggaagtgcaaaagctgagtaaacaatgaggaaccacagatacaagcataaccaatagaatacaagagatggaagacagaatctcagacgctgaagacaaactagaggaaatgaattcgtcaagcaaagaaaatctgaagtctcacaaatccataacataaaatattcaggaaatttgggacaccgtgaaaagaccaaacctaaggataataggtatagaagaaggtgcagaaacccaactcaaagttgcagcaaacatattcaacaacatcatagaagaaagctttcccaacctaaagaaagacatgccaatgtaagtacaagaaacctacaggatgtcaaatagagtggaccacaaaagaaagtcccctcgtcacataataattaaaacaccaaatgtacagaataaagaaaaaatattaagagcagcaagggaaaaaggccaagtaacataaaggcaaacctatcataattacaccagacttctccatggaaactctgaaagccagaaggaccaggatagatattctaccaactctgaaagaacacagatgccagcccagactactataaccagcaaagctttcaatcattataaatggagacaacaagatattccacgacaaaaccagatttaaacaatatgtaaccactaatccagccttacagaaattactggaattaaaactctaacctaaggaaattagttacactcacataaacatagacaatagataatcccactctacaaaaacacaaaataaaaggcagggtaaatccgcatacaataccagtaccaacaacaaatcaaaaaaaaaaaaaaaaccaagaataaacactcaatggaccttaattttcctcaatattcatggtcttaactcacctataaaaagacataggctaacagattggatacgaagacagaaaccatccttctgctgcatacaagaagcacacctcaattcaaagaccaacattacctcagagtaaagggttgggataagatattccaatcaaatggacccaagaagcatgctggggtagctatcctagtatctaacaagttagccttcaaactaaaatcaatcaaaagagatgaagaaggtcatttcatattcatcacaggaaaaatccaccaggaagaagtctcaattctaaacatctatgccccaaatacaaaggtaccaatattcgtaaaagaaacattattaaaactcaaatcacaaataagacctcacacagttatagtgggagacttcaacaccccactctcaccactggacaggaacaccagccagaaacttaacaaagagacaaagaaactaacaaaagttatgacccaattgggattaacagacatctatagaactttctatccaaacacaaaagaatataccttcttttcagcatcacatggaaccttctcaaaaatcgaccacatactcggcaacatagcaaaactcaacaggaacaaaaaattggaataatccctgggtcccaccatgctttaaagttagaaatcaaaaacaaaacaaagtgcagaaaacctaccaactcatggaaattgaacaacatgcaattgcaccattcctgggtcaaggaagaaataaagaaataaattaaagacttcctagaattcaatgaaaatgtagacacaacatacccaaacttatgagacactttgaaaagaggagagttcatagctctaagtgctaacatgaagaaactagagaatagccacatcagagagttgacatcacaattgaaagttctagaacaaatggaagcaaattcaccgcggaggatcagacaccaggaaataatcaaactgagggcagaaatcaataaagtcgacacagagaaaaattcaaagaatcaatataacaaagagttggttcttcaagaaaatcaacaagatagacgaactgttacccaaactaaccaaaaggcagagagagaacatgcaaattaacaaaatcagaaatgaaaagggggacataacaacggacactgaggaaatccagagaatcttcaggtcatacttggaaaacctgtactccacaaaatttgaaaatttaaatgaaatgaacaattttctgtacagatatcacttaccaaaattgaatcaagaacagataaccaaactatatagtactataacctttaaggaaatagaagcagtcatcaaaagtctcccaaccaaaaaaaccccgggaccagatggattcactgcagaattctcccagaaatttaaagaagaactaataccaatactcctcaaattgttccacacaatagaagcagaaaggacatcaccaaactctttttatgaggctacaataaccttgatacccaagccacacaaagttacaactaagaaagtgaactacagaccaatatccctcatgaacattgatgcaaaaattctcaataaaatactggcaaatcaaatccaagaatatatcagagaaatcatccaccatgatcaagtaggcttcatcccaggcatgcaaagatggttcaacataagaaaatccatcaatgtaatccaccatataagcagactgaggaaaaaaaaaacatgattatttaactagatgccgaaaaagcctttgacaaaatccaacaccccttcatgataaaggtcttggagaaatcagggaaacaggaacatacctaaacataataaaagtaatatacaacaacctgacagccaacatcaaattaaatggagagaaactcaatccaattcctctaaaatcagggaaaagacaaggctgtccactgtctccatatctcttcggtattgtccttgaagttctagctagagcaatgagagaacaaaaggatataaaggaaatagaaatcagaatggaaaaggcaaactctcactatttgtagatgatatgatagtctacattagtgacccaaaaaactctacctgggaactcctaccgctggtaaacaccttcagcaaagcggcaggatacaagattaacagcaaggctatctgttcaacgatgttcatagcagcactatttgtaatagccagaaacctgaagcagcctagatgcccctcaactgaagagtgaatagagaaaatgtggtacatttacacaatggagtattactcagccgaaaataacaatggaatcatgaaatttgcaggaaaatggaaggaactggaagaaaccattctgatcgaggaaacccaatcggaaacaggcaaatatggtgtgtactcactcatatgtagattttagacatagagtaaaggattaccagcctacaatcaacactgccaaaaaagctaataaacatacaggggaccctaagagagacatacatggtcccctggagaagcagaaagggtcaagatctcctgagcaaattgggagcatgggaagatggggagggagctaggaggatgagaagggaagaagatgacagatgcagaggacatgagggagcagaaaggttgagtcagggaagaatagatgataacaagaatggagataccacaatagagggagactttttaggtttacagagaaatcaggtactagggaaatgtctggagatctacaaagatgacaccagccaataatctaagcaacaaaggagaggctacctcaaatgccctcccctgataatgaaattgatgactaacttagatgccatcctatagcctttatccaacatctgctggaagtagatgtagacacccacaagtaatcaccgcactgaaatggaacccagatgcaaagaaggacaagtgaagagcaaaggggtccagaccaggcttgtgaaacccacagaaacagctgacctgtggaactctttcttcccaaactggtagctggagtaccagcatgggaatgatccagatgccaggaacatgggcttctgtgaggaaaccttgtaaatctatgggacctcctgttgaactccagtacttatccctagcatgggtgtggactttgggagcccattccatatagagggatgctccctgagccaagacacatggaggtgggcctaggccctatcccaaatgatatgatagactctgatgacaccctatggaaggcctcagcatccatggagagcagaaaggatatgtgatagatagggttttagttggctggggtggtaagggaggtcaggaaggataagggaactgggattgtcatgtaaaacaatcctttttctaattcaaataaaaagttgaaaaaaataagattgactctatatatcaaatcactactatatacaaatgacaaatggactgaggaataagttaggggaactgccacctttacaatagccataaataatgtaaatatctttggattactatctaacaaatgaaagagctgtatgataaaatccaaatctttgaaaaaagaaattgaaaaatgtatcagaagattgaaaagtctcccatgctcatggattgttagctttaacatagtaaaaatggccatcctcccaaaaacaatctacagatctaatccaatccctgtcaaaatttcagcatagttctttaaatatcccgaaaaggtaatattcaacttcatatggacagaaaaccaaggatttctataacaatcctgaacaataacagcacttctgaaaatatcagcattcatgatttcagttgtaccacagtggtgtagtaacaaaactagcatgcaattgacatgaaatcagagatgttgatcagtggaattggatcaaaaagccaaaagaaatccacactcttatggacaactggattttgatacagaaggtggaaaaaagaaaacttcttcaagaaatggtgcttgtctaacttaatgcatacagaataaagtatatagatccatatttatcaccctgcacaaagtaagttcaattggatcaaggacctctagataaaaccagacacactgaaccttttagatgagaaagtgggagacagtcttgaacctttgggacaggagacaatttcctcaacagaacatgaatagctcaggcactaagatcagcaattaataagtgggacctcatgtaccagataatctttcataaggtaaaagatatgatcaatagtacaaaagggtagcctatggaatgggaaaggattttaaacatctctatgttggatataaggctaatacccaaaatatataaagaactcaagaaactacacattaacaaatcaaataatccaattaaaatggagtacagttctaaacaggaatttctcaatggctgagaacacttaaataaatggtcaacattcttaggcattagagaaatgcaaaacaagactaacatgagatgccatcttacacctgtcagaatggctaagatcaataccacaagtgacagctcaagaagagcactccttctgagctagtgggagtgaaaacttgtacagtcactatggaaaccaatatggcatttcctcagaaaacttggaattgacttatctgaagtcccagatatggcaatggagtatataccaaaaggatgctccattataccacaaagatactttttcaattttgttcataatgactttactcataatagccataaactggcaaaaacctagatgttcctcaaccaaagattggttataaatgtggaacatttatacaatggagtattactcaactattaaaaaaaaagacatcatgaaaatttcaggcaaatggatggaactagaaaaaatcatcctgagtgaggtaacccagactcagaaagacaaacattatatgctttcacctataagtggatattaggtgttaaataaatgaaaatcatgctataatccatagaatcagaatggataagtaacagagggctctaaggtggtcacatggattttctgggaagtggtaatagaacagatttttgagagtagagtggaggaaggtggtaatgggtacaagaagaatccagtagatgggggaatagaaagagagtgtatggagagagatgacctgaattctagggcatttagggggtgatgtggaaatggagtgaagtagacattcctaggattctaagagggtaactggtgaggactcctagtaatggatgctatggagcctttagtgggcatcttttgtaatcaagcaacttccagtgttggggctgggacaccaacccagtcataaaacctctaccctataatctatcctttctgcaagatatgctatggcaatagaggttcagaattggtggggatggccaaccaatgactggtctaatttgaagctatgaaagggagcccatgcctaacactgcccagatgaccaggaattggaatctgaatatcacagggacctaaaatagaaaaaaagaattcaataaaatgacttctaatgatattatgctttactcatcaaaagttgcccagccaaatactcagattggcttccttaagcagctggtgggagcctttacagaactcaacagctaaacatgaggcaaaaaggaaacccaaattggagatctccacatggtccctcaccttggagttcagggaaacccatagaggaagaggaggaagaagaattgtagtatccacaggggttgaagacagaaggagatcattggctcagagaatcaacaaggcagtgaacataggggctcacagagactgaagcaacaatcatggagactgaatgagtctgcattaggttttttgatggggaatgtactgtgtatgtttatcttattgattgttaaataaagttctgttgggccaatgaaacagcaagttagacaggactagtagtcaaagaggattctggaaaatgtagtagagaagtggtgttccaggcaggaagtgacatagcaaggagactcataagcaaggagaaagaggaaatgtcccctttccccttcggctcctccagcagcaggatgtgagtcaccggcaagagagggtgccagcaaaaggcatcctctataaagataagtcttataacatatatagatttatgataattaagactgagctagcagatgagaagtcctagtcattggccaagcagctatgaacctaatacaagtttctgtgtattcatttgggccctaactcaggcggacagctgacgtaaagtgcacacttggcggtggggctcaggcagcttttggcagaaagatttatcataacagtcttttacagatatgttatggttgttagcttgatgtttgtgtgtgactactagcagtaggagtgagggtatctctgacccttgtgactgctcttggaaacactttttttctattgggttgactcatacaaccttgatatgaaaggctgtgtgcctagtcttattatatcttgttatgttgtgtttggttgatatccctgtgaggccttcttttttgtgaagggaaatggatgaggggagatctgagagagaggggagtaggagactggaaggagtggagagagggaaaacttgggtcagggtgtattatatgacagaagaataatttaaaaacattaccaggaaaataagtaaataaatggagtgcaaagtaaaataaaatgaaacaaaaagtaacaaagaaatgcaattagttttttttttgttttaattaactttgtagatatttacttagcatgtatgcttaaaactaatatcttggtggttagagagtcggaaaagtggtaatgagcagttggtcctctagcagaatatgggtttagttctctgtatccacatagctgctcacaacagtccttaactctagttccaggatggggtgcactcttattgcttctttggacaaccatacacatacaagcatgaagcaaaacatttatgcacataatttacaaataaataaatattttctttttaaaggaataataaaattaacatggaattgaggagcacagcaaggttgtcaatgaccagagttagttgttgctaccctaccacagctgaaatatagtagatactaagtcaatggaaagaagtacttgtcctagatggaagaaagaaagaaaatggaagaagttcattgaaatgaaaaaattaagatgagtgatgaactatcaaaataattcctttgaatcccatgacgtctaagcaaataggatgtgcatcttagagaagaaaatatgtctgtatggattttccttaatgaagacatgtcctcagtaggcagtgtgtgcaaagccatcagtcttttaccaagatgatattctttgtctcagatggagcaattgctgtgggataacataaaattatacttaaagataattatattcatagcaatttgggaaacgagtagagataccgatgtggtgcacaaagtggaaaaaaagaatagagtcaaatgtagaaggaaagttaatatattaattgtttgtcctttagagttcattgctccacagcaataaataataattttgtacactgtgagggtgtgttaatctcattagtttagtaaacagctatttggccaatagctaagcaggaagaggttaggtaaaagagtcagaatgagagaatattgagaagaagggtggagttaccagccagaagcagaggaaacaaaatgtgtaggagatgaggtaacaagtcatgagccatgtggaagaatgcaaattaataaatatggattaatttaagttgtaagagctagctagtaagtttaagttatcgactgagcatttataattaataaatctctatgttgttgattggggagatggtggtcccagtgaaaaaccttgcctaaaatttattggcttaactgaaagatactgttttcaacatctccctatccaatccatcaattagggtcagacgctgttttatggaagacagagttcttcagagcacctttgacatctttgttcctaagggtgtaaatcagagggttgagtaatggggtaccaaaagtataaacaagggcaatttgacggtcttcatcatctgaggagatggagcggggtctcaggtataccaagctacaacaaccatactgtagcaaaaccacagtgaggtgagaggaacaggtggaaaaggcccgctggcggccttctgcagactgcatgcgcaggatggtgcaagcaatgaaaacataggagatgcaaatcagtaggaatgggactgtcagcaccaggatgctcactacatagaggactgcctggctcagatggatgtcagcacaggccaggcgcatgatgggagccacatcacaaaggaagtgattgatttccaggcgatgtctacagaatggcaacgtgaaggtgaaggcagtaagctgcaaggagaaaaggagtgccaggcccaaggaacccagcaccatcttaacacagagattctgggtcatgatgaggctatagtgcagtggatggctgatggcaacatatctgtcataggccatgactgccaagagaaaacagtcagtgcagccaaacacagaaaagaaaaacatttgtgtcccacaaccagccaatgacaagggcttctgggctccaaggatgttagaaagcatcaagggcaccacatctgtgatgtagcagatttccacaagagacagactgcctaggaagaaatacatgggcgtgcgcagggaactgtgtgtgcacaccacccagatgatgatagtgttgccacagatgatcatcagatagagaagaaggaagagtgtgaagaggagagcctggaattcagggacattggtgaacacacggaacacgaactctggtgtgtcggaattgttgaagaaataattttcagccaccatatgttctgcaaaacaaaacccaaaaagtcaatggttgctggtctgtattaaggccgggaaggctgaatcggagttttattagggattgtctatttagtatttagttttcaaacacaatgttggtgggaaaatgttcataaatagaatgtctcacataattttctctggacatatccattaattgggcacttgcctataaattttcataacaagtcatacagattgattttcctcttgttacatggcatttaaaatcctattggtgtgagctaattctttgcttatatttaaacagatgtagttgtgccattttatagttagacaaatggaaattctgtccatctttttggctaagcattgttattattgaaacacaacatacatacagaggacttcagaaaatctaagtagaagtgaattttcaatttttgagctagacaatactgaaatcagtattaaaaaagtcaacattaagaaatggaacaacctaagaacatctttcataatttccctaagtttttatttctcataaataaccattcttgacatttatcactgcagattatcataattgtgttttgatttcttttgtaattataaggcatgtagtttattgttccagggtaagtgcaattaaaacagctcctgaacaagaattctgcattgctagatgagtaatcagaatatgtgactcacagtagagatattgcaaggtaaaataatatgctttgcatcagtcaataatacaacatgtttgtaagattagctgatttaaatattaaaatgaaaataatttgttttatttatttacttagcagtttagaaaggtattactatggaaccctgtgtggcttgaaactcactatttagaccaggctagcttcctgaatactagaattatggctatgtgcccccacacttggcaagagatatgttattttatacctgttagtgaaatataatcatggattgtataaaccaagcatattcattccaattaggcaagtaatgttctaaaattatatacagtagaatagaaagggctgaagatgaaggaaagaaagataaaagtttaaaatgaccccagaaagtgtttgttaaagaaaataaccttaagcagtttttaaaattgcccttgaagacaaaatttacatacacacaagacaaagcatccaaacaaagtcaaatataatgaaacaaaaagttcaccataactttggtttagccatgttccatgataacaatggcttgatcatccaaatgccaacacaagaaaatcaactgcacatattagggtgaatagaaactcacggtggtggttactacaaaaagaaatgcagtggagaatctcttaaccaattttcacttactagatgggtcagatcatccagtgttcctcatttgaataacaacctgctgctgcccttgacagtgaacacagagatccacaaagttttattcagcatatctgaccatttctatcccactcagcatgtttgtttatgactccactgactgtctctcaacttactacatcaaatgactttttaaagtaaggtgatgtttattaagtgtgacaagatataattaggcattgtgaatacaaaatgtttcataagaagaggcatttgaatgtttgaaaaatacttgattatcataagctgctaaaagttgctgtgaaataattcattattcaggcaatgtactaaaagaaaattgagaaaaatgcttaatcttatagtcatatttgcatctaacttaatactttatgtcacatttacacaatccagtattccttagctgctaaaatgtcattggaaattttagggcaaaatgatagaactgagaaagatcatactgagtgaggtaacccagcctctgaaagaaaaacatggtattaactcacccttaagtggatattaaccctaatgcagaggagaaatgtgctacaactccccaggctgagggtgtgaggctggtagggaaaccttgtgtatatgtgcagaacttgaagtcagacattaaagctgaagaatttatttgctttatagtacatcgataaatcacactggaagcttcattcctattaggaaggagctatgtatgatattagggaaaaaagcaactcttcctgtgaatgccatgggagtatacagcaggtgacaagtagtgtttaacaggatgatgtaacagatgagtgattctccgatggggatccccacttgacagagccatggagtcactagctgtggataactattagtctctgtctataatgtctctcatgtgttactttattccttccctaagaatagctttgaatgttttcccactgtttgtgtatttatatcatgaaaataatccatctactgggcacacatgtatctatgaattgtcaggaagatgacttctcattaagctatataattttgatatacttgcatatgatttataactagatctattcttccaagaggctataagacacttaaagtctactttgttccttttcctcatcctaacacatgaaaataacaatttctcctcagtttaagacaaacagcacaaaattagctcatttttgtctcagagcaagttcaaagtagactaaagggttttgtaaatagatcacaagtttaaaactttatagttatgcacaaggtcagagagcaagggtctaaccaaggttattaacacacagaaacctgaacacttaagcaaattatttgtttgcaaagtcttcctgataaaagaactgtgtcttatagcttttctcattggtcactgtgcccccagcctttggtaacagtcttactccacaaaacttgaaactttgctttgccatggtagaaggctctacctttattgttcacccataggaatgtgctactgaccaatgagatgtaattcttgaatgtttttattatggcttaagatctcctatagaaatgtttttaaactaactgaacagagaagcaaggagaattggacagagaattgaaacagaatcgaagcaaaggagaactagaagctacagatgtagaattatagccagcaaagaataaagagcatgacttgaacagcatttgtgtgaattcattctgtaacacctcagtctagaagttttctaagttccctttcctaatctgtggcatctgacctgaatcctgggagacagttttgtgagctggactaacaaggtaccaaatgttcccacctgtgaacccttcaggctacaatgaccaatgacctggcttaatatcctcactggtgcaatagtgacactaatgttatgggagtagccaagcatattctgcttggatttaaaatctactagacaagagggagtttggtgcctgggcctattaattgaccccaaaacctatggctgactaggtcaaaggcattcaactttcatttcttttccatctaacactacatacaaattcttagactaaagctactactcacattattatataactctctccatatctctccatatctaaccttgctgtcctcagcatatgctgatgacttctgagtatctaattaacgtcaatttgaatgtcaggtgagaaatacttaactctcggctttactagtttacattactgatatatatatagtcaaaactgtccattaattttttactttaatatgtgccgccagatttactttttttcaaaaaaatgaattacattataaaatttcagaatctttaaatttcctttaaagccagccagtgtccaatggctccttccacttaagactctcatagactctggcttttctctcactaatgactatctatattttttgtcctatgcaacactagagaaattttttgaggtacgttcagcacatcaatatatagtggaaaccacaacaattaaactattaatgttcttgttaaaattgcctgttgggttaataagaaatgcattttttggcccctttgtggcagacagatatcacagcaatgagtactaggtgtataataccaattcagaaacactatatatataaaattaaagtgatctttaaaatacccaagaattatgagaccacataaatctgtaggtatagttcatgtatatccaaaatacaaataaaactgaatgtctaaggaatataagagacatgtaatcctacctttttatagcctattagaactgaagactatagagattaagatcattgcaaatgcatatggtggttattgacatgcctgatgccagaatttacatcctcatggattaaagtagagatgggcacatgtgcatgccttaagtatatttctcttttcatttacatataggaatttgaaatgtaatatagagtgtagacatcagtaaagaaaacatctgtgtgattctgacagtgtagcaaaaacaaacactgaagctcaaggcacaattgataggatattaattgacaaacaggctgccaaggtagaagaaactgtcacaatgagaggtgatgtggtggctgtcatatgcatgaggatttttcaagagcatcttcattgtccttgttagggagggacataattttacagtgtccaaagggggactcttcactactccaaaatggacacataagaaaatttgcctgtgcatataaggaagcaagtgataacagtttatggcaaacgaaccaattagtttggtttttctcctaccctttacccatgtttgtgtaatattaagaaaattaaaggcaaaccaaaatataaagagtcatgaagatgatgataagaataagaaatagtgtgatggaaaatgagggctaaagaacagagaaagactagaattcgatgactgtcttctgaaagtgcctacatgtaggagaccttattctcaaaaagaaggcatgtattgaattggttgagaaactggagttctaacttttattgcacttgactttttatatctggagaagttccttcagtactaaaacaaaaagatgttttcaaaatatcaatgatcataaatactcttgatacatcacaacttgtcacctagagattaggaagagatgttggccaaggattattttttgttgagtcttactgaagaaactccagtctgagacttaggtggtatttggaatctctcccttttccctctgtattatattgttgcccaattactgtctgtcaaaggatttttatttctgataagaatttaggaaatcttggaccatattattgagactaaataaatgaatgcagggctctgctgaagcaatagttaagtggtctctcctgagaagcttggcttgcaaatttgaaaggggagtatatgctgaagcatgatttcacgaagaaagtaaaatatataacaaataagcaaggatctacatctaatatttagagcagcttgaaagggacttttggtgacaaagctccagatcagtttagaatttactacaatggaaacttgcttatctttaaactgacaatatcaaatctagtctttctgttctattcctcaaagctacccagagtgatatgaaaattgttttgcatatttaaagagactgtatgatcaaaatccagggacaaattccaagagcctcacctctgaatgataaaatcatagaagtaagtatagtcgagacattaaagcttttttgcacttaccagaacagaggtagaaatgaaagcccctctcctgggcttctctgaactagatttttcatctgagtcccatagttaatgtactcatggactcacattggttctcatgggacattcgactcttccaagctccttagggacaatatccctgaagtgtcacatcaagataaacagttaattttttttataatgttgtctgtaagagaaaagaggaaataggcaggtagctgtttttccatttcctttagttcagtgctgttcctataatgtgtttgctttacttgtgacttagtcaattattgctaatcagagaaagtggactgttggcttcatgtgtcccagtaagacaaagaaaccttaagagatgcctttgtattttcttcttgtgctaacattgatgaaagtcttagaatattgagacaaactcatctgccattaaatgagagatattccatctctaaagaagaacaaagataatgtatttgtactcttcactggatagcaggcagagtaaaagatagtctgtaaagacagggattcaacacccaggaattttaaattaaaacctaaagtttgcacatataatattgagaaatgatattgagaaacaatatctaaatgatttgaattgtttctatggtcacaagaaaatatgaaataacagaccctgaaatggacaaaaagtaagggagactatacagacagacacacagataaaattagtatgtcctttcttataacatccctcataaaattttgtaattatcacctaagtcaagaacaatcattctattatttcaagagatacataaatccacaggataaaaagcaaacattatatatataatgttatatactcatactcattgttaatattgaaaaaattaggtgctggtaaataataagttattctattatctctcatctatcaatctacctacctgtttctcatctatggatgtatgtgtgtgtatgtatgcatatatctatctaatctagtatctgtctcctacctaacaatgctctattagtggacttcctccatctgcttgtctctctgtcattctatttatctttatctactatcaatttatcatctacaaatcttctatatgcctgtagtatctatcatctgccatctatcttctctttctctgtctttctctgtatagctctctctacgtggctgtatttatctctgtctatctagtctcagctaggaatgaaatatagtagtgccttaaaacccagataattctgaattgttattttggttacagttttaagatgaaccttctatggatcatagcccaagaccaaaaattaagctttggtgcttcatttagaaagaaaactgtcagggagtttaggaggatgaatataatacaggaaggccaagaaaaaaataaaaaatccactgtaatataatgcattggtttgagagacattgttcataataatcatgcaagggacagagattatttctcaacagatcttttcacacatgtgttagtacaacacaaagagaaaccatatcttgtaatagttcactcaggagagaaaggaaactctatgtatctgttcctgattttttcatgtgtttgaccttttctaatttcttttttttttttgagacagggtttctctgtggcttttggaggctgtcctggaactagctcttgtagaccaggctggtctcgaactcacagagatctgcctgcctctgcctccggagtgctgggattaaggcgtgcaccaccttttctaatttcttgtgttccatttaccaaggtgtacttcatgacgaccttttcagatttccaggttctggtaaactggtaatcaggaaccttattctacaatatgactctctctgagtccagaagtagatgaataattttccgtaagttggtatatggtctcaatgtcagttactcatgattgtttaacactgtcttaggtacctcctatccaaaactatcattggacctttatactgtctaccaaacaaaatcaagcacacatcaatatttttgtcagttttgattaaagtgtgaaatccacacaatattattaattttaggatttcatcatttaagaatacatttttgcctgttaatgagatatgatcttatcatgggtatttgggtgatgccccatggggaaatcacccagtcataatgtagtcataaggtctggttggcttagttacagaattaacccatacttttttgtttgtttgtttttatctagtgtgggattttagtgtgattatggcttcttagcctgaacaagaacattgtattagtttacaaatcttaaaccagataaccagaggacatatggaggtgaaatacattgtttgagtcctaaccactctagaatccagaagacacaagatcatcattaatttggctcttgggaacatcctcccatggtgacctagtgagaaatgactgtgaaaaggaattaaagaaaagttgagatcctagtgtggtggtgtacacctttaatccaaacacttggaaggtagaagatgggagaggccagccttgtctacagagaaagttgaaggacagccaagcttaggtagtaaaggtaacaatcaaaatcataaagctggtaaagatgtaattgaatgactgagccatactccagtgctagcaagcagcagaatttgtcaggtttaatcacatggtgctgggtttagagttatagatagaagaaaggaaatatggaagaaagccactaagtcttggcatgtgttaggggtgtccctgaatggaggtcaagtagagagaccatggcatgaaactgtgaggtagaatcctggatttctttggagacctgaagatgttagatatgccagaatcatgggaaacctgcccatgacagctgctaacagggagtgtaaacataccaagagaaagaaatgtgctgtactgaacaaagataaaatgagttgaagatctgaagagcatttgacatcggaattggagaggcagagttttcagtttggccaactgttttttggttttgctttggtcaaacatttttcactatgctctttccctacattttggaatggtaatgcatatcctatgccattatattttggaagtatgtgatcttctttttgattttgattttatagaggattgtagttaagaaatttcataaatctcagaagagactgaactttggaattttaaatattgttgagagtataatatactagagtcaactttgaagttggactaaatgcatttttataacaaatttttccaacttttttacttgaattagaaacaggattgttttacatgacaatcccatttcccttctcccacccgtcctcccctacctgcccacccccaactaaaaccttatatgtcacatatcttttctgctcctcctggatggtgaggccttccatagggtgtcgtccgagtctttcatttcctttggggtagggcctaggcccaaccccgtgtgtcttggctcagggagtattcctctatatggactgggctcccaaagtccacacctatgctagggataaatgctggacttctacaggaggtcccatagatttctgaggtttcctcacagaaatccatgttccttgggtttggatcagtttcatgctggtattccagctatcagactggggagcaagagttcctggatattcaggtcagctgtttctgtgtgtttcaccagcatggtctggacctctgtgctcttcactggtccttctctgcatctgggttccagttcagatcagtgattagttatgggtgtctgcttctacttccaccagctgctggatgaaggcatataaatcaatcatcaatctcataatcaggggagggcatttaaggtagtgtctcctccgttgctgagctagttagctggtgtcatctttgtagatctccagacatttccctagtgcctgatttctctgtaaaccaaaaatttctccctctattataatatctccattgttatcgtgtattcttcccctgactcatattttctgctctctcatgtactcggcatccctcttcctctccccttctcattctcctagctccgtcccccctctcctagctccctcctcccaatttgatcagcagatcttgaacctctccccttctccaggggaccatgtatgtatctcttagggacctccatgtttattagcttctttggcagtgtggattgtaggctggtaatccttactctatgtctaaaatctgcatatgagtgagtacataccatgtttgtcttttttcgattgggttacctcgctccgaatggtttcttctagatccatccattttcctgaaaatttcaagatcccattttttccactgagttgtactccattgtgtagatgtaccacattttctctatccattcttccattgaggggcatctaggctgcttccagtttctggctattacaaatagtgctgctatgaacatcattgaacatatgtccttgttgtatgaatgtgcttcttttgggtatatgcctagagtggaattgctggatcttgtggtagactgattcccattttcttgaggaactgccatactgattttcaaagtggctgtacaagttagcactcccaccagcagtggaaaagtgttcctctttctccacatctctacaacatgaactgtcattggtgtttttgatttgggacattctgacaggagtaagatggtatctcagagatgttttgaattgcatttccctgatggctaagaatgttgaacacttttttatgtgtctttcagccattttagattcctctattgagaattgtctatttaattctgtactccactttttaattgggttgtttggtgttttggagactagcttcttgagttctttgtatattttggatatcagccctatgtcagatgtggggtaggtgaatatcttttccctgtctgtgggctgccgttttgtcttgttgactgtctcctttgccttacagaagcttctcagtttcaggagatcccatttatcaattgttgacctcagtgtctaaaggtcttggataaatcaggataacaggactatacctcaatataataaaagcaataaacagcaagcaaacagccaacatcaaattaaatggagagaaacttgatccaattcctctaaactacactaaacctattagaaaacaaagtgggaaatacccttgaattaatctgtactggagactgcttcctgaacattacaccattagcacagacactgaggtcaacaattgataaatgggacctcctaaatgcattttttttgtattatgatatggctacatgcctttggaggccagggagtaaatgtggtaatttaaaagaaaatgactcctaaaaggagtggcactattaggatatttgtagaaggtttactgatgtgagggcagactttgaggtctcttttgttcaagcttcactccttatgattcttggtcttcttcctgttgcctgcataccaagatgtagcagttcctttttatcatcatgtctgcctgcatgacaccaagctccctgccatgatgatagtgaactaaacctctgaaatgaaactgtaagtcacaacctcatttaaacagtttactttattggagttgccatggtcatggtgtctctttacagccataaaaatactaagaaaaaaaggcatttagaatctcagaaagacatggccaaagcaaaacatcttcaaatgaaaatatttttaaactgtaagagtacagagaatataaagaatattgaaacctgtgggaaagaaccattaaggtttactaagaaaaattacattgaggttatttacatgttttctttacttctgactcagtggttattaatttctttggtgtacactttttttgagaagcctttgtttttccatttgaaatttttctggttatggtattcttaattgatagatgatgatgatgatgatgatgatgatgatgatgatgatgatgacgatgatgattgagattaggcaaaacaatcagaataatcatttttcagcagaaactaattataggtaagcatgaaatgatgcatttcaattttgggaagaaaataactatccctgatagaaaaaagaaaaatgatgcctggtaaacctaaatagctatgacagaactgtggagatattctgtttgtgttctaacaaacaaagcttgcctgaagattagagtgaagagctaagccacaagttagccataaaggccagacagtgatggtacacacctttaatcccagcatttgacaggcagaggcagacatatctctctatgttcaaggtcacattggacttcatgagattgatccagtctaaaagagaagcagagttcatacctttgttcccagcacttgggatcagacattgttaatcccaacactaagggaatgaagacaagagtgatatttctgggcagagagaggacaataaggcagaaggagacaggagctcctttcattcaatatgaggattcctagagaaaggaccatgcattcagtctaaggattcatggggacaggattatacatttggtttgtggatttggtagaggtaagaactagtggttggctgctctgcttctctgatcttttagaatttacctttacatatgacttgtgatttttattattttttaaaataaatttttatttaaattaaaaatgatcatattttacataacaatcccagttttctctccctcccatccacccattctcccaaccaacctgccatcccacccgcatccacatcccagagatggtgaggccttccatgaggaatcataaaagtctgacacatcatttggggcaggacctaggccttatctagtttttctaggctgagaagcaaagacatgtcaggaaataatctaattgaaggctgaaatcaataaagtagaaacaaagaaaacaatacaaagaattaatgtaaaaacagttggttcttagagaaaatcaacatgatacacaaatctttatccaaactaaacaaaatccagagagatagtattcaaattaacaaaatcagaaatgaaaagggggacataacaacagacatgaggaaatccagagaatcttcaggtcatactttgaaaacctgtactctacaaaattcaaaaacctaaaggaaatggacaattttctggatagatattacttaccaaaattaaatcaagaatagataaagcaatttaaatagacctataacccctaatgaaatagaaacagacatcaaaagtctcccaaccaaaaaaatcccaggatcagatggtttcagtgcagaattttaccagaaattcaaagaagagctaatactaattctcctcaaagtgttccacacaatagaagcagaagggtcattgccaaactctttttaggaaacttcaattgaattggtacccaagccacacaaagagacaactaagaaagagaactacagaccaatatccctcatgaacttgatgcaaaaatactcaataaaatactgacaaatataatccaagaacacattagaaaaatagtccaccatgatcaagtaggtttcatccaagggatgcaaggatggttcaatatacaaaatcccctcaatgtaattcaccatataaacagactgagatagaaaaaaacacatgatcatctcactagatactgaaaaagcctttgacaaaatccaacaccccttcatgataaaggtcctggagagatcgggattaataggaacatacctaaacataatagacaatatacagcaaaccaacagctaacatcaaactaaatagagagaaactcaatgtcattcctctaaaaccaggaacaggacaaggttgtccactctctccatatctcttcaatattgtacttgaagttcttgccaggccaataagataaaagtagatgaaggggatacaaattagaaagagagaagacaaactttcactatttgcagataatatgatagtttacatacaagtgacatgaagaattctaccacagaactcaccttcagcacagtgacatgatacaagattaactcaaaaactatcaggagacctactatatacagatgataaatgggctgagaaggaaatcacagaaacatccccatttataatagccacaaacaacataaaatatcttggggtaacactaaccaaacaagtgaaactaaccaaacctgtacaataagaacttcgagtcattaaagaaagaaattaaagaagataccagtaaatgaaaagatgtcccatgttcttggataggaaggatcaacatagtaaaaaatggcaattctgcctaaatcaatctacagattcaatgcagtacccatcaaaatcccaacacaattcttcacagaccttggaggaacaatactcaactttatatggaaaaacaaaaaacccagatagccaaaacaaccctgtacaatagaggaacttctggaggcatcaccatccctgacatcaagctctactattgagttatagtaatgaaaacaggttgatttttgcacaaaaatagacaggtagaccaatggaatcaaactgaagacactgatgttaagccacacacctatgatcacctgatttttgacaaagaagctaaaactatacaacggaaaaaaagaaagcatcttcaccaaatggtgctggcataactggatgtggacatgtagaagcctgcagatagatccgtatctatttccatgcacaaaacttaagtccaaatgcatcaaagacctcaacatagatccagccacactgaacctcttagaagagaaagtgggaagtacccttgaatgaattggtacaggagattacttcatgatcctattttattgttaagccaccatattttcactatatagattcctactctcagaattttgatattctccattcttaacatgtgaagattttttaatataacctaattttctccgtaagaattctcagatgtttccccagatctgctcttttcagtttgtctacaatatcagtggctgcaaaatcaaggctgggttttctggcagcagaagcagcaatgtaagccttagcaggcaagagtggttgtcaatgaggttgggcttgcatggtgttaacctagggattgaactcacagggcactgtcctgggggataatggtttagcaggcaaggacatgaggcctacctagatgacagagcctatggcctgtggctccaactttggcacttaccaaaccagactgcaatttaggtatctgcagagctgacagtgacaagtgacatgggggtgggaccagcccaagcagcgatgtgacagtttggagtcactgcagtggcaaggagaagaggcagcttcagaagctgtgtcctacattgggtgcaaaagtgttgtttttttctgaattgttctattaccattgaaaatttgagagtctgatgttcatgttaaatctttttaaagattaaagaagcagaggattgaccagctgaccttccctttcttgctagagtcctagccagtgtctattctctttgcacatccatgactgaagacagaaagctgtgatgacatattagttataatttattaaagcttgtctgaatgtaaagaaagcaaaccaagacatactagctatatctatagaagccagttgttgttggtgcatacctttaatcccaggactcaggagaaaggcagatggatcactgtgttcgagacctctctggcttactggagagtgaatcaaagttcatacttttaatcacatgatttgagaggtataaaaggtggaggcattcagtctgacagtcagtctccagccacattaagggttgaagagcagtctgagtgaatctgaggagcaatgaattcaggagcagtttgatggttgttcctttggtctggcctgaggtagaggtaagagatagtggctgctttgctttgctgatcttcagtttgtagcttaaaccctagcatcagtctctggatcttttgtttttcatgttacagaaggcgaattccaagtccctcccttctccatcctgtccatcttccctgtccatattcctgtattatctatggctaattctggtcagctagccacaggctctgccacctaaatcaaaattaattttattaccatggcctaggagtgttacagtacaatcaaatatcccacaacaaatatccaaaatatataaagaactttaaaattggatatcaagaaaacaaataactcaattttaaaatgaggtatagatctcaacaatactaaaaaataaaactcaaatggctgagaaacccttaaagaaatgttcaaaatccatagtcatcaggaaaatctaaatcaaaactactttgagatttcattttacacctgcaataatggataagatcaattaaacaagtgacagctcatatgggggaagatatgagacacaacactcatccatggttggtgggattgctaactcacatgaccactatggaaatcaggaagatggggatcaggttaatgcaagatctaattatacaactcttaggcatatgcctcatcctaccacagacacttgctcaaacacaaatactcatttctactctattcatagaagccagaaattataaacaacctgaatgtccattaacagatgaatggataaagcaaatatagtacatatacacaatggaatattactctgctattaaaaatgaaatcatgaaaacatatgtaaatggatgtaactaggaaaaaagtcattatcctgagtaaggtaatccagacaaagaaggacagttatggtttgtatctgctgtgtggagttagctgttaagttagagataagcaagttataatctatagtaccactgaggttcagtattgagcagaggactaagagggagggacatatttccctaggtagtgggaatagaataagaactttttgtttgcttgcttaatttttgccttaatttattgttattatttatttattattttgccctatgggttttgcatatatattacagattctggttttgtcattttaaggagttttctgaatatgcaatgaggtggtctctgagcctgtatctgtttcctatgccgctttatgggctatttctcttttgtttatcttattctcatttgatttttaaatatttttatattttattgtttgtccttagttacctgctttctaacaagcgaaagaaaggggtaggtgttgtgggaattcattccaccaatagctttgtgttactggctttgttctcattaacagtgggattcagtgggaagagaagattggagttactggggggagcaaagaaagggaaaacataaccagaatatgctgtatgaaaacaaatctcttttcaataaaagaaaaaagaaagtgaaggacaaaaatggtcaagacaaaatattggtgcctaagtatgtactcttcttatagacataactagtcggatcatgtgaatagaaatggatatttttatgcttagcaatgtaatataaagtttaattcattaatggaaactgcaagttttactagttgagacaatttgctacagtatattgagaatatatactcatgaataaaacccatttagaaaaactgaaattctcttaaaatgtcacaggccatgggatatacatgggatatacataggtcaatacatgcacatttattgaatatatgctagaaaaatgtttattcagaagacatttactcatctcttcatcttctttcacaaattggagtcaccagaaatgaagatgtttccaatttattaggtgttgtcataattaatacaaaggttttctgaagcaaataaggtgattttacttcattggcccctcctccatccatggtggaggaatataggaaacttagcctgaggtaaatgcaaatcattggaataaagtttgttatttcaagactcattttgttcacaacaaacattaaaaatgcagtgtaagggaaatgctggccatgcccgcctggggcctggcacaggtgacatagaccatgcacatttgggcatggtcagagtgacgtagcaagactttaaatatgagggtcaaacgcatgcagctctctctgttccctcacctgcctggatgtacaagactgactccgtctttcctaataaacatctgctcatcaaactagctctgactcatttgtgatacgaattaattgtgttgcactttaatgccagacaagttattcctcagatctattcttgcaacatggaattagagtaaaagttgaattcacatttgaagtccatggaccagagaaaggaatgcatgtttattttcatgtcccttcttattttatgttttcaaatatccaagttacaatagcaaactattactgaacttcccatattgtgtttgttccttaccacataggaagcttttgtgtggccaagtaggaaggcaaaacctacatttttcactaaggccttccttctgacttgataagacaaacaatattttgtgtgagaagtattggcacaatggttctttatcagctcagacaacatggaatatagcagcagagattatgaattaagttggtttcatagacagaatgaggtagtcagctactgagatgagtcaatgggtaatgacatttggtggcaagactgatgacctgaatacaattcctggttgcagtagggagttaacacttacaagtagtcctctgtaccatggcttatatagtttttactatgtcagtacatcatactgtcaatcatatgaagtatatggttcaaaattagttcaatgatcattaatctactattgtgcccttgtgtattaaatttagtttcttggtttcaagccatttcattgaggcatttttgaatttgtagcagtaaattatagagtcaacaagtatcaacattacaggactttcactagacaaattcatattatattcagggaatttgtgccaatttctcaggccatctctaaaacacatggactttagagacaatgagtcttactctttttatcttacagcctgggcttagcaaattaccatagctgtgttaggagaggttaacccccagagaacacagttcttggcagtcctggaggagactgagcaaagtgaacctaccatgaacaacaaagtttagtgacttctacttaaatgtatatttactttagtattgcatttagcctatacactggaagggaagtacacaaacaagtacaagcctcaaacagaagtgagaggaggaatagctgagtgcatccagaatgaggagtcatcaagaaagaaagtgaagaggagggtggaggaacaaactttgatgctataatttccaggacagagactttctgtcagcagtcacaagtcttgcttcactaacctagctgttcataggtgcttggccagtggaagctaattcctgtttccttaccagcagaagaaaatgaagtcactaatgaaatactttaaatgaaaaaaatcctatacattaaataaacaattgattactgtatcttcacatcaagcacaaagaaagatttattttagaaaatattcatcatctaaaaaatataagtaacccccttttatacaatgagcatgtctgcatcctcaggaggatgcatgtaaacagacagcagtctttattcaaagtatgtatgtgaggttcccaacaaagcacttgcttgtatgaactgagagtcgttaaaacagagtgaagtagggcagcactctcatattagaagctgtattcaaaatttaaaattatgagtccaaaaatgctgaatctggcgatcatgggcaacacatggttaaaaaaccatctcaatgtgatgttcacaacagtaaatagtttaattttcctttaaatttaaagatgtaactttaaagatgacagtcacccacccaagtattctactatcgtctaacatctgtaactccactcagactgctttatggaagatagaggtcctcagggcacctttaacatctttatttcgaagggtgtaaatcagagggttgagtaatggagtcacaaacgtgtagacgagggctatttggcggtcttcatcctctgaggtgcttgagcggggcctcaagtaaaccaggctacagcagccatactgtagcaagaccacagtgaggtgggaggaacaggtggaaaaggcccgctggcggccctctgcagaccgcatgcgcaggattgtggcagaaatgaatacataggagatgcaaatcagcaggaatgggactgtcagtaccaggatgcccacaacgtagaggacagcctggtgcacatggatgtcagcacaggccaggcgcaggactgggggcacatcacagaggaagtggttgatttccctgtgatatccacaaaagggcaaggtgaatattaaggcagtgagttgcagggaaagaaaaagtgccagggccaaggaacccagtaccatctggacacacagcttccgggtcatgatgaggctatagtgcagagggtgacagatggccacataccggtcatatgccattactgccaataggaagcaatcagtgcttcctagagttacaaagaagaacatttgtgttccacaaccagctaatgatatgggattctgggctccgaagatgttggaaagcatcaagggcaccacatctgtggtgtaacagatttctaggagagacagactgcccagaaagaaatacatgggcgtgtgcagggagctgtgcgtgcacaccacccagatgatagcagtgttgccacagaggatcatcagatagagcaggaggaagagtgtgaagaggagagcctgaaactcagggacgttggtgaacacacggaacacgaactcaggggaaccagattgattgagtacgggtttctcagtcaccatatcttctgtaaaaaaaagtgggtgggatggagtggggaacccttatttactgagttgtttcgagactgaggaaaagcagggagcctgcatatgcgtttgttatgtgatttccttcttataattcagtttcaattccaatgttggaagatgaattcacagttaaaatgtctgatatatttttccctataaatcttcattagtgatagagttccttatctatgaacaaattccagataaaaccggtagaatcttcttctcaaataccttcactaatttgttttagcattttaatttaactgagaaatgctaaaattttatttgtaagtaaaagggtatattttgtatacatcttgtagaagtacaaagatacgccattgatatgtttaaaattagaaacttggatgcactgttaacatttttagtgtgtattcttactatgtcatagtagtatgtatagttcatgtagagatcttaattatttttgcaataaaattaaatcactaccaacatgaacatatacaataagcaaacagacatcattcctatccctttaatcttatgtatcagaacagtaaccactctttgggcttttatgattctagattagctttactatgttttaattaatgtatgtaatcataatgtatattactgtccatggattccatatcatttctgcaaatgctgctcaggtttctcttgcagttctgtgtaataatattctgttcttttcatagctgcatcataccccacatggtgtccatactctaattttcatgatacagtcactttacatcagggtttgacctcatatcaaaataggcaatcatttccaatatgacatacatttttatatatttcccttatttgattttttctgaattccttactgtgccccaaaccttttcaacttacataaagatctacatgacaattaatgaaacataattgtgttatggttagagtaatgttacctgatatatgaattatgacaaagaaaccaaaatgcagtaggcaaaattgaattatacatgaaaattattagatgaattaaagggaacatcatgcatataagatattggataataattatagattaagtatttttagtttgattgcaattatatttaaaatgtatgatggcaatagaatgttatatacttttaagaaaaggagtgtaaaaaaattctatacctgactgtcgagacttgtgttctgagcagtgcaaaaactgtctgcgatttaaaaggacacaggaatatgtcttcttaactgtaattaaaacaacttttcaataaatacgctaggttcctgaatgcttaaataaaatatttaaatccagactaggaaatcacatagtaaagtaatgttttaaagaatcactcataaaatatacattaaaatgaattattaatacaaaaattatgaaaagcaaaaatgaatagccagaaacaaaaagcatatatgaaataaacaacttgtgtatcactatatatatatatatatatatgtatacatatatatacacatatatatgtatatatataaatataatctacaaatgtaaaataactgcataagtataaaaccaaaatttatgtgatcaggcagggtgtgagaagtgaaattatgaaaaggttcttcatctaaaggaagattcagaggatattttattataatgtaactaactaggggcatatatttcagaataatcatacatagtttaatactcaaattattaatttttaaaagtcatatgctgaaaaatgtgttataccattcaaatggatgaaaatgaagaaaaatataattgcattttaaggtaaaaatcactgcaaataaaacaaggaatgtgactggtgactgtttcactatgtataagttgaagttcaagttcaaatcaggtttatgttctctgagagaatatatatatatatatatatatatatatatatatatatatatatatatctccacccaaggaaatctgtaatgacagaaagtctaacatcacttttcttttcttttctttcttttttctttttggttgtagttttcaggacaagttctctgtgtgtagttctggctgtcctagaaattgtttggtagaccaggatggatttgaactcacagagatccactggcctctgcctcctgagtgctgtgattaaaggcatatgccactagcaccagtgtgacatcattttcagaattgatgtttatccagtttccagttcttagccatccaggcaatgttgggcataggctccatctaatggtttgggcctcaagttaaagcaagccactcccacatttgccttgtcttattacatcttttgtttctttgtttgtttggttgttgtctcctgggcgcctgaggtagatatgggggagaagggagatgttggttatctgacaacagtggagggaacaaaaattgtggtgaggatgtattatttgaaagaagaatctactttccataataataaaaaatgaattttgcttcatctattcaacacaaggaaactaaaacaacaacacagaaaaaaatggctgactgaagaaacagaatgcccaaaacaaaacaaaatctagggttagtaagatacccacaatcaaaaacactctgaagtgaactgtggaggggacttctgtttttttatagtgttaagaatagtcacatttgtttatccctatgatgttcattaatttatattatttacttctttttcaagattctttatttactactcatatttatatatccatcattcttaaccaacatccactcaattagtctgtcagaccatccagtgtccccattttgtacttgttattaaatgactgcttgactgtgaaccctcatatcttactatccaggttttttgactattcctaatttccaaaatatcttgtttgcttataattcacctcatcttccatcaaaataacttatatcatgagcattaatttcataattaaaaatgccaatgacagtctatgctgaagagcatgtggaaaaaaagaaacactcctccattgctactgggagtgcaaacttgtaagaccactttgaaaatcagtatggcgatttcttaggaaaatgggaatcagtttacctcaagatccagcaatttctctcttgtgcatatacccaaagtatgcacactcatacaacaagaacataatgttcaactatgttaatagcagcgttgtttgtaatagccacaacctggaagcaacttagatgcccctcaactgaagaatggatagagaaaatgtggtacatttatacaatggagtactactcagcgggaaaaaaaaaagcaatagaatcttgaaatgcgaaggcaaatggatagaacaagaagtaacgatcctgagtgaggcccagtcatgaaaagacaaacatggtatgtactcactcatatatgaatcttagacatagagcaaaggattaccagcctgcaatcccgtccccaaaggaactaggaaacaagaatgactctaagagaagaatgcatggactccagagaagaggaaggggcaggatctcctgaactaattgggagcatgagggtaggggagagagagagctggttgaatgagagggggagaagaggaggggagaagaggggagaggaggaaatggaggagcaggaagtttgagcagggggaaaaatagaggagagcaggatgagagatatcataacagagggagccattattggtctgaggagagatctggcactagggagatttccagagatctacaaggatgacaccaactgacaacctaggcaatggtggagaggctaccctaaattcccttcccctataatgagactgatgattgccttatatgccatcctaaagcccttatctagtggctgatggaagcagagtcagacacccacagctatacactgagctgaactctggaacccagttgcagagagggaggaatgaagaacaaaggggttgggaccaggctggtgaatcccacagagacagctcacctgaacaagggggagcacatggaccccagactgatgtctgggatgccagtacaggactgatacagacccctgaatatggatggaaatgaggagacctcggcactctatggggcccctggtagtggattagtatttatccctggtgtaagaatggactttgagagcccaacccacatggatggatgctctctcagcctggacacattggagagggcctaggccctgcccacgatgatatggaagattttggggaccctccatggagggccttaccctccctggggagcaaagagggatgaggtggggggctggtggagagttcaggggaggggagagagaggaagaagggattgatatgtgaagcaggcttgtttctaatttgaactaataataataacaaaaaatgaacaactaacatgccaatgaatatacttaaagaagaacaaatttacatattttgacaacttgataatgtataattataacctggtagatacactttgactggaaataatgctttcagataatttcttcatgtatagacatggatatttgtcataattttcaatggaatggagcaaataaaagtcaaatttcaagtataatacttggtatgtcatcttttgtggattatgcatgaaaagtctgctgttttctgaatagaaatggaggaatggatggagacggggaggcgaggagatattgggggaactaggaggagatgagggagggaagactctggccagggtgcaaaataaacaagtgaataaaagagaaaaaaatccaagtatcaacaaggaaagaatacatgttaatggtttactatgcctatgatggaagtgtctgaaataatttgaaataacactgtggaaaactaacaagatcaggaaaccttattaacatgagtttgtaaatcaacatatcatttaaaagcaataacatataattacaaaaatgaaagaacatgcctggaaatattaagtattgacattgtgaggttgatgtacttttgtctttctttttattactttgtgtttctccatatagatgtactataataaatatacacagttctccaattgtgacatcactaaggaatcttgttttatgtttggcatttcagacgtgtgatgagacaggatggtagagggaggattaattggatttcatgttcagatctgagtttgaagctcaatactcttacctgctaatttaattttcacactgatcacattacttaacatgacttggttttttaatgagtgacaggggatgtgaacatggtctttgtgaacaatttacaaacacccaatgtcctaaatgtgtgacattcctgcataatctgggtcattaggttcctcctccccgttctcccatcaagatggagttccctttggatacttactcttacatatcacccttcctgaaatggagggtaaagccctttacagatgcatcttctcagaccttttgttgctctctaaaccttcaataataagaaaatgagtaaaagatgaaatagagaaagaaaatagaggaaggatttcatcaggataattacaagcacatacaattaaaggcaaataaggtagaacattgttgttcatgaaaattttcaagaatggttctgtttttcttaagacctgaaaaccaatgtagtaatgttgcatacaccaggaggcagtcatgatctcattgactatataccctttctgtggatcaaataaaaacatgaatgtttagaatgtgatgtctgccagaacaaatctcaatagagaaaatgcaaggaaaaagagtacacatgctcaaaactcaggctgtggcctaaaaacatcatttaaaaataaatttgtatttgaaaatttgatattgaccattctgaaggccactaccaatggcttttaaagcacctttgtgcatgcacatatgtcactgtgtgacactcaatcatttcttttctccattactaactgtccctgaaaacccactgattgcattttttcatctttaatacttaatggctaggcagatctctgtgagtttgaggccagtctggtctccagagaaagtgccaggataggctccaaagctgcacagagaaaccctgtctcgaaaaaccaaaaaaagaaaaaaaaagaaaaaagaaaaatacttaatggctttccccaaaactgtttttggagaccacaacaaccatggcatcatcttcatataaataattcacttgtttatgagtgtctgtatcgccagttgagagccttatgtttaaagaaatcattttttaaagccagtttgataaacattttagttactgctatattaaattacacaaggccacagaattttttccattcatttctatatttctactccttgatttggttttgtttgtcttaaattatatcattttattaatgtcaaaatctttgaatcagctttcaaagcaaagattcagtggctctttctacaactgggctatggtataattactatagaccacacagactctggtgataggtatgccatttgtgaactttctgataagcttatgcttacctcaactgtctaggcattgcaacctaccagcaaataaaacagacaaatattagctgagtctgaactactaactaaaatcttggccacagctgagaaaataataagtcatgattgctaaccttagcttcataaggtatgataacataaattgaaatagagcaatttaaggattctttgcaactaattcctaaactgtgctttttcttttttctttcttccctttcttcctttcttctttcatctgtcttttcttgctttcttttttggctttatgatgcagggtttctccgtgtagtccctagccatcctggaattctctctagaccagactggcctcaaactcagagattctcttgtctctgcttcccaagtgctgaggttaaaggtgtgtgccaccatccagtttaaactgagttcttttaaacaagaatttcatgctctttttagaagtgaaatgtataatagtaaaatttaaaatttatttatattcccagagatttacagtacatgctatcatgataacattttttgagcaactgatgcaattaattttacataaaatttcaatttgggacattatattttacatagcaccttccatgtttcaatgacatgcaaaaatgtaggagacttgagctttaatctgacttcatgctaggattttcaaccatgtatcacagctctttttttctaggtctataaaagcaaataatgataatatatactttaacaactcatgtgtgatccataatttatttcaatgttcatgactattcacttaaattataaagcatcatagaaattgtatttttatcatttgtgggaagagaatctacattaaggaaatgctgtctttaaggtactccctcaccagtttcaaattcatttcattctattggcttctaaggaaactcaccaaagagcaaattaactttgctgttgagatgctgctgccacagatgactgggggagttccaacagagagactttttcaattttcaaataggtgaatagagaataagagtccacaaggcttttgtttttaatcttatagatggaacaagaagacaacatgatgcctttataaggcccacatgatgttaagaagcattctttgttttctggcactcaggagaaaagacactgtgtagaaattggtgactggggtagaactgggtgagaagcatatccatgagaaccatgatatcatgggataatctaagtttaagtcattactgagaagatttgtatcttcctcagtaatatagaatagattctgatacaattattaagtccattcttagctgatctagtcagatctctgagtgtccttcatgggatctctacaaaattaatgagtcccccaagaagaggtaaatccctcgtggcaccccttaaacttaattcatctagagaaagagaaatgttaaggagaaagttttctgcatggtcactataagagttgttgccttgggatttcaggcaggtaccagttattcttatctgacaccccacagggaattgatggttttatattccaggtaggatatcccaagtgagtttctgaagacattcattccagctccagaacttaaagtatgtgtaacatatttaactaacactggtccagaatttctggagatccagggtattatttttggacctaacatgtggcactttaatcctcaggccataaggaagttcataaatagacattctcatctgtgatgtgagatgttggactctacaaacattagctttgaaatgcaatgaaatgtgtttttttttcaaaagcagagtgtgtgaagtatttttctatggtcattttttgttgtctttggtataattttatgtattatacttatttttcttttcttaataaagtttccttttgatgattaaaaatcactgtctccagtggcattatgaaggccagagaaggatagagcatgtcctatttcacttcattcccttgagaagaatctgaagctatattcatgttcaagaaataccagccatcttcctcactttacctcccacagcattggggctacaggcatgcatagtatgtccagattatcacatgaatttcagggatttgttttgttttcttcagttgtccactttattccatagaaactctgaatactgaatctgggtgccattcacatctttctatttttattttagaaatcatcttattttacatatcaaccacccattacctcaccctcccatcctcccatgctccccactgacacccccaacccactcccacccccacccacgacccaagtatagtgaggtcttccatggtgggggtcatcaaagtctctcacatcatttgggtgaagacctaggcccatgtatttgggctgcaatagtatgcctccatagggaatggcttcccaaagtcatttgtgtactagggatgaagactacctccactgttagaggttctatagactgtccaggcctcctagctggcacccacattcagagggctccgttaggttcaatgctggttccccagctttatgaatagggtttctgtgttcttacaagtttgggtcaactgtttctgtgggtttatccagcacagtcttgtctcctttacttattcctcctccctctctacaactggattccaggagcatggctcagggtttagctgtgggtgacttcttctgcttctaacatctactggatgaaggctctaggatggtaaccaaggtagtcatcaatctcattataggggaagggcatcaaaggcagccagattctaggcatgtgaacacagttcttcatgctttcactacaaggtctgctattacccaccaagtaatcttgacagacagatgtctctaatcttaagagcattttagaactggtgactttaccctaactcttagcctaattatgttttcttatttgtttcctttcaccccacacatgtcatgtttaaaatcatgtactttattatggatgctattaattttatttttgtgtccataatctactttacatccattatccataattaatatctattttcagtatgtcacacatattttttaattaaactgtgggtaggtttggttatcaagaaaaattaatacgcatctcacgtagttactctgcttcaggtttgctatgaaaagaaggaccaaaatctacttacttggtagaaaattagttaccatggtcttcacaattatgtacccaccaccatcatcaccaccattgtaatttttattttttcatgacagtgtttctttgtatagttctagatgtcctggaactagctctgtagaccaggctggtctcaaaattacagagattcccccattagccctgcttttcaagtgctaggataaaagacatgcaccatcacagcctggctaatgttatcattcttaagcactgtgatctagtaaaataccatcattgttttcctcctcctttcttacttcccaatatcccttcttctcctattgtctttctctgtgttgtgtgccaaatacatatggctgggaaaggtataagataatgtaggttatacaacagataagaaggtatgaaaatgggggtggttgagggtataaggaaagttgctgtatgtggtcatattttactacataaaatatggactctcaacgaattaaaatagaaaagacatgatggttaatggcaaagtgacacacacacacacacacacacacacacacacacacacacacacacaccaatgtatgcacccaagaccatggtatatgaaaacatatgtaggtatacaatagcaattagtgaaaagagcccatcattttgaaagagagtagatgggaaacatgggagggttctgaggatggaaagagaagggagacatgtaattaaatcgtaatctcaaaacattaactgtaacaaaaccatataaaatatgtgccatgaaattgacaagtataaactgtttcttgggataaaaataaaagcaggaaatgaaaatgagagaacatatataatgtcaattgcttattttgaccacagaaaatctatgcaaagacattgcaaattgaaaccataccatatcttaagagtggtaattcatgttcatattcataatccttggaggactaaagcaggaagacttcaattttttttgtcaacctatgctacacagtaagaccctgtctccaaatccaaaatacagaaccaaatgaaaacaaaatccaaacaatgtactatttgctatcttccttctaaagtcatgtggaactttcaaccaatcagatgttgtgtcatggaaaacatctcaatgctgcaaactgcccaccaagctaaaattcaggaccaggacattgtaattagcaccactcccctctttaaattttatacacaacccacacagaagggaaaggaagatatgtcactttggaatccttgtctgtgtaatactgagtctaactgaaatctctggaagcacactaactacacttgttatggagaaattacactgtgtagagctattgactaataatagttacttgaaatattggccatggtggatctttctactcaaagaggcttctactattataaaagcaaatattttgaaagctaatagaaaatgtgtgtttgttgatatgtttattatatgctttgtgtattatttatacttctgcaactctgtaagcactttatgataacattactgctacatagccttttgaataaatataaaacaattaccttccttaatgaaagcaatttaatcaatactttattagagaatgtacttgtatgtatagtaaacaatttgaatcattctgtgtgttgctagccctcaaaaattctctctctacacaacttatatctcaagacaatgaattcataatagaaccacaaacaccaggccctcttgcatccacttctgttttaaattaaaagactgagcaatagatgcaagaggttgcagtactgtcatccttggtttccatttgtatgattgcatttgttaaaaatttgtttactcttataaaagttaccattcctggaataaataccattttgcctcagtttctaatgggcttctgataacagtgtatttgtccttactatttaggtgtcttaatcataatggcctactgaagtcaatcattccctggctcaacatctcatataatcttaacaaaaacatatgtaataagctaaaactttcccactatctatataaagacatatgtttgccaacacaccttactttttgctcattttcttgcttatatctttcttacaagactaatcaactagtctagaagtatcacatattaaagaatgtcacaacacataggtaaacagtaagatgctttatgtttattgtttctctgaacatcattttaacatcagtagagataatactttttacagtggtacaggggtttgctttagctcaaactaaactttgttatattggatttttgctatcctatcaatatttgggagagtaatttctggtaagaatttttcctatggcctctttcatctcactgttcctcagagtatagatgaggggattgagaaatggggttcccagtgtgtataccagagaaacaaacttatcttgcttggggttgtagctggagttggggcgtaggtacatgaaggcacaacatccatactgcagcagcaccacagtaaggtgagaggaacaggtgttgaaggccctgtggcggccagctcctgagtggagtttgagcacagcagctactatcaaagcataggttgtagcaatgaaaaagaaaggcacagcaatggctagtgtggctgccactagcacagagagctcatggatatgacttgaggcacacacaagacgcatcactggaggcacatcacaaaagaagtgctctattcccctagcccgacagaatggaagacagaagatgaataccacaagctgtaaggaaaggaacaagccaatgactacagaagccacaaccaagcggacacaaaatgttacagtcatgatgagagggtactgtaagggatgacagatggcaacatatctgtcatacgccatgaaagctaggaggaagcagtcagcactaccaagtccaatgaagaaaaccatttgagtagcacaggtcagcagagtgatggtcttctctgaatgtagggtgttggcaaggatatgtggtaccaccactgtagtgtagcatagttctatccctgagaggctgcccagaaaatagtacatgggcgtatgtaggcgggcttctgtctgtatggagaccacaatgaggatattccaagagatgatcaatgcataagccaggctgactccaaggaagcagagcatccgtagctccgggttgctaggataggctaggaacacaaactccatcaatactgagtggttttcccaggtcattgtgcacatgggtgttttctttagagtggaaaatgatatctctcagatgagtgatatatttaaattatagacaattcttttacttatcaaatataaatttagatgtgagagacagactatcttttatttctcaattttttacaaaatttattcacatgtaaatctacatgttaatttctacctgcaaacagtatggaagtgacatactattaaccgaaaccctgagaggaaatgggtggattcagaagggtattttcagaatgcattgagtatcaattaaattctttaggtaaactcattattcatcatcaaggttttcttgggtcataaattattctagaatgctcacaaagaatttcatcaattattcactcatataattaatgtctatagatgtcacttatatgcatatgtaatttgctgttttttcatgcatttaattagtgacatgacaatttcatcctcacagatcatcctacaatggaaagttaagatagaaagaaagaagcaagacatgttatgagatgaatagtcatagacaaagtcttcaagatagacttgacaatgtctcaaataagatgctgaaaatggtgttccccttttttggtttctcttggcttatcaaataaggatagatatgcctcaaacacatttgtattttacaataggttttccctaaaatgttaaaaacaacatgagcacactgctgaaaacttttggtgagtttgaacaagatggtagaatacctactcagaacctatcccatatttccctttatcttccaacaggaaatgtgtaatctaaagaggaaaacgtattttcctcaaaaaggaaagcagaataagaacaatataaaatcacccccaaatttaaatgaagaggttcaactcattaagtatgcatatccaaatttcttactatcaaattttaatattagtcattaggcaataaattcttttcaaagaatattctttcaaaatatcccttggcaccataaaagacatttacagaatgccatgtcaatgccatgtgccctttggttatgaatggctttgagttgttcatatagctagaaaatacactttgtttcattcactttatcctcctcttctgaatttcaaaagtacttcaaatattttctcatgatacttagcaattttcatgtttcactatagtaccagaaataagggtattgcatgattatgaaactaatgctgattgtgaatgacatgatttgtataattctaccaatttgctctataatgctaggcaatctggatgttttctgaatttaactttcttaattaaataattggggaacaattatgattaagtcaaaaactattgtgattttaagtgggatattaatataagatactgatcagaatctattttaagagaaacaataaaacatgatctcaaaatcatcagtaaggtcaagaacaactatgtgcattatttatattcttatctttctataacatcaagtgaaggaagggtaagattttacaaaatagttgtacattgggtagataatcatttatttagatattgactaatttttattattatttcacagtgaaatacttttttggcttcttatgaaaaatagcacattctatatttgagatggactatggataacattttattacttaagcatagagtatttttctgtctacaataaacagacatctaagggctagcctaccatgtgtctgatgatggagggccataatgatgagttctgggaattttattaaaatcctgcaaacaatgtcatcttaattatacagttaattaattatataattaaaattatactagtataatattcctcaggttcttgaaactcaaagagattctgtacattaggacatctttcatatacaattaattactaaatttataattcttgcttcaatattagaaggtaggattctctaaaatttcattctgtaataaactgatattggttccttcaacttatctactctgtgtcttccaaacggagacatgttttctctacagaaacacttcagacactaactatttcgttagccccaagtgttctttatcatttatcccagtaaatttaacaccatgatttgaatgtgtgtcataattttagctttttcctttcaatctttcatttctataaaaacaacattactagccaagaatttttttgagaatggctgtgtctgcacattcttgagatactgataatctaggctagaacagcacactgctagtgcctagttactgttacataaaaaagggaaattatggatttgatattcataagacctcaattagatacccactctgctaataacaggataatcctttgagaggccatcccacacaaattactttccttttgcttaaagatgtaaaactacttttaatctaatagtgccatggtaagggaaacacttggattgattgtgaagcttatgaaggtggataatacaggtcttctctcagtttttctatctgctttaagaatggaattaagaatgctcatttctaaagagatcacataaagatgggaaatacaaaaaaaaagaatgctcatttcacgaaagaggattagatgaacctcacctgagaacaatatttctattaaactacaaacttatgaaacttcaatattaaacattaaagattggtgattaatattttactcaaagtaactagattgtgaagtgaatttggaggaacactgaatcctggattaaagtatttgtgacatcctagagtttattcctaagtccattgctattctaacagtataaatagcttgcaaatcaaggggtagaaaaaaacttcttaccttcaatgtgaagagagagggggatacaatagatctgtatcctcagctgtacctgtaaaaggaaggtcctagaatacggtggctgactattattgtgaaccagtatgagatgacagtgatcttggggagactactcctgtgggattgatcaagcctttgtagaccatccccccaaaaaaacacataaggagcaaattgctttgtcacttagttttgcctcatagctttcatctcccagaagaaggtatcccagtgattggcaatctatccccttgctaccaatgtattctgagtgatttattgattaatttatttaaaaaggcacatgagaatatatgagaacttagagtgaattgtcaaaatgagtatcaccaagcactgaaaagggtaccattttcactaactgtgtgaagatctgatacaaaactggcatattatcaggaagaaaataatccaatagaaaatagtaaagtaggaattaagatgggaaaaacctggaaaattaaaaataacaaagagagaaaaacaggcctaactgacatgaaagattagtatatatatatattaaatgaaagtgtgtctttgaacaaatcataacatgggaaaatgcaccgtagtgtgtgtgagaagcaaatctagagtgaaagtgattccatacatatctttgaaaaaggtacactgattgatggtagggcaggcaattgaggaacttgtagggaaaagaaatgtacagtgtatttcatgactttaaagcagttaagatatatccaatgtcttaatcaacaaaagaccattggtttctttctaaacacatgataaaattatatttctcttttaaaatatatttacatttgggattataatataattacataattttcccttctctttttcttccaaactcttccacattttactcattactctctttcaaattcatggcctagtggtggagatggtcttttttatactgtaatcatgtgtctctgactaaggaactttcacaatggtttaataaaaatctgaaccaacaatatatgggcaggagagtataggcagtatttctgtgcaaagacaggaactgggaggaggaatctaggcacagagatttccaccatcagacttggaacaatttgggcatggcgcattgaaggaaaggatcaatatggcagaacatatattcaaaaatatggattaactaagttatgagggttagttggatatagcaagtctccatgtcattatttgggagttggcacatgaagaaagacttgttacatcacctgcttggttgtataatggtacttttacgtatcttttcaggactgactattggtgtgcttttctttgaagaaaccgatttctccaaaccatggtgttccttagttgtctggaattctttcaggtatatgatcgaggcttcttgggctttccactgcactcattatcatgtctatgtttccttgttttgtggtataattgccagttagggaaatgcgtatcttaaccctatcctctctaacttttgcattcctgcctcccacacttctatgggtttcctgaggtccaaaggcaggaccccaatggagatctccaatttagaatcctcctctgcatagtgtcctgttgtgggtctctgcacctgcttccatctttgccttgaggaggactttctgataatcactagctaagacagaggtctatgagtataaacataatagaatatcagtaggaattatatcattgaccctttttctttatccctcttctctcactctgtctgcccctcagtctgcctgtctgttggtctttttttcccttcccttcctttcttttcttttttttcccatttgtggttggtctctgggctacccaatacccagttcctgacaatcaaggaaatatggtcatgggatctctctgttggcctggtcctcaaattaatccagacattgaatggcacctcccacaaattctgccccaccattgctccagcacatcttgtagacagaacatcttttaggtctaaggctttgtggctggattagtgtccagatttctctttcagtaccctatagattactgttctgtaccaaagaacatagggatgtggtgtagggagacaccataaccatgactcctaagggctggctacaggtgtgcttaaccacaggggatgtacaggatgatgcatggggggttcttaaggtgtgggagacacgtaggagctcccctcttctcctgcctccctagcttgctgctctgggcacactctggcttgagcttggctggtattatctgaataaagatatctcaacctacaggctcacacttcacctggctcccaacatggggcccgaacccacaaccctgggattaagagtctcatgttctaccgactgagctagccacattctcaggtttccaatgggctgctgctctcaaatctgaaaaagctgattctgttattacacacctgctagaggtgatggcaggtgtgggtatacctgcatagataaaaattgacaatgctccggcatatgtctccacaaaaatggaacagatcttcaaatattataacataaagcatgtcactggtataccacacaatcctacaggacagacagtccttgaaagatgtaataggacacttacggagatgctccatagacaagctggtaagtcgaaatcccccaaacataggctgcataatgctttattgacactaaactttcttaatgccaatgacaaaggacaaagagctgcggaaagacactggactacggaaaaaaaactgctgaactgaatcaaacagtgtacttcaaagatgtgctgacctgggtatggaagcctggacatgtgttatgttggggtaggtgttttgcattggtttccacaggagaagaaaaactttggataccatcaaagttgatcaagattctagttgaaaaagacaactctcttgacaaggacaactgaaaggtatttactgaggtatatctcataaactaaataaaagcctcccaaaggaaagggaagttctctgtttctatcttcacaggaaaactcatctctagaagtccaagaacactacatgggtagatgcttaagaaaagaaggtagctataaccatcaaacaaaaggaacgtttctcaaataactctatttctcttcatttcctagtccctattcaattaaatcaatgctggatttagagttggatttggatttcctcctctaaaatccaagcacattgtttaactaaactttagagtttctgtattatatcaagaagctaattgatttaatacagaataaatgaagaatttgaggactgtcttttgtcttttcttggctctttctttcaaggcatacactgtctcataattgttgttttcccatggttgcctttcccagcatgcatacatatacaagcaaacatttctctgctaacacttacgtttgagtcctattgtttagggttgggactggaaggtggtgttcatgttggacacccctttcagatgactttagggcttagctggaatagacatagttaggatgtacaatagcagattattgtattttcttgtatttaaccttcatgattgttaattttggatgttttacactattaaattttaatccttttttagactaaaaggggaattgtagggaaacaccataaccacgcctcctaagggctggctacaggtgtgcttaaccacgcctgtcagggcgtggtcaggggatgttcagaatgatgcatggggggttcttaaggtgtgggagacacacgggagctctcctcttctctgccctccctagcttgctgctctgggcacactctggcttgtgcttggctggtattatctgaataaagatatctcaacctacaggctcacgcttcaatgtggtaggtatttctttggaatctctgctccagaataatgacatggagattttttattaattgtgaaagcttggccttagctttcttaagctagctcttaaaaacttaaattatcctatttatattactctatgttctgccatgttgctccttacctctcatcaataacctacatctgaattcctctgcatctggctggtaaatctcctgtcagattagttttcagagtccctatctgcccagaaataccacctatcctctcctgcctatctattggcttttcaatatggaataagagagttcatttgtttaccctcaggagccctaagaaaaatgtaccattcacttgctgtagtttccagcctgaaccaataagaaggatgtggggctggggcccccaaaggaccttgatagttattagaatcatgtcttgttgtcttaggatgaccctgaggatatttggacaatgctcaagtcctggtatatctacctgtaaatgtgttggtccagtctctatgggaaagttcagagtttgactgagtcccagctggaatagtctgtgagatttgccatcctagatagctactttgaaattgtccttgatgctgacttttgaagaaacagcaagagaggcattttgagaggcaagaccacattgtctagttgtcttgtcttcactggtgtatcatatgtttgttttgttatcacacaaagttttaagagcaatatacacatctatattaacataaatatggaattgcagtgtgcataagtcactaaagattttatattgtatgagcaggtaaaagacatctatcaatttaataaatccatttggattgcataaccaaagtgtcatgaggactctttagtcgacaagatttattatgtctcatcaagtctcagagctcttcccatgtagatgatcaacagatatgtcacctgtctcattggttttgtttccttcatgtctacagccaagatttccagggggtatagcctggtcaaattcaatcttcattaatttcgaaggaattcgtaggtatttgtttcctgtgaatataaaggcataacctctccctgaatataacacttttcctgctttccatacatgtagttaagatatccttaaaatacatacgctggtttcattcagcagcttttttacaatccagtgtatctcagcagctgttattttttgtcattagcattttacaaattaaagttgataaagcactatataggatgcagatgtcttgtgttatggtatttgccatccttacatggcttgctttttttatattacattactctctctttaaatacttcattttattattttcaaactatttttttctaggactgtctatacccattttattttttttcttcagcaccaaagcacattttcaagaattctttaactgtctggacctagatttctgtgaacctataaacactcactgaccatatgagccaagccttaaagagccaggccacctccattcatctggaagctcattctatggatcctcttagcacttggggcttgtagctggctctgatcccctcagattagtcccactgtctaccatacttgctctaggctgaagccattgtttgactttctgtgagagtctagactcaagcccattggtactgaccagaagcctgaaagagtgtggttattaggaagctatgtatgcctccatgtctggaacttttctcagttgcattaggccctgtgggtgttgggcacccaatgctatgtgtctttctttgtaccactatctcaggaataatgacatgggactttttaataattatgtaaacttggccttagcttaggagttttcctaattagttattaaaacttaaattaatctgtttatattaatctacattctgccacatgggttgttacctctcacaagtatcatatgtctgacttcctctgaatctggctggattctttttcagagttccaatctctacctggaagtcctgtctatcctctcttgcctacctaatggccattcagctctttattaatctaatcaaaaggtgttttaaacaggtgaggttaaacagataaatcttcacacagtgtacaaaaatatcatcctaatgtggtgggtaaagattccataatttaaaaaataatgagtacatagagtagattcctttccaatgccttcagattaactgaggcaagttgtgtgtagttaagaatcagcatactttgggcagtgttggatataggctgacactttgcaatgtactatgtagagttaatgccagactagtaccttatccttttattcttaatagaaatatgttacaaaaaatctttctgccaaaagctgcctgatccccatcgccatctgtgagctttatgccagccacccgcccgagttagggcccaaatgaatacacagaaacttgtattaggttcaaagctgcttggccaatgactaggattcctcatctgttagctcagtctcaaatatcataaatctatatattttataagacttatcttatcggacaccttattggcgtccctccttgtcggtggaccacattgtgctgctggagcaggagcagaggggaaaagagagaggcttcctgtttctccctttttaaatatgagtctccttgctatgtcacttcctgcctggatcaccacttctctactacattttccagaatcctctttgactcctagtcccatctaacttgctgtctcattggccaaacagtattttatttaacaatcaataagataaacatacacagtacattccccatcagaattcagtgaagatatgcccacctacagatagaaactctgagagtgggataaaaatctaaagtacagatacggaaaatcccattatgaagagttgagaagtgcaacttcaccaagttgatcccaaaacatgcaacagaagagaaggaatcaggaatgtttgaagagaaggaacagtgaatgtttctgccaaccactggctactgcaggtcttatttatagatttatataaggaaccttgaggaaaattaccagggtaagaacaataatttgtctggagtcagcttcattagtcaggccactaaattatcgtaatttcattactagaaataattgccaggcctcaagaaatggcatgttggttaagagctctttcaatgcaatcatatatggttaagtgttagtactctaaaactcacataatatactgaacgtctaagaaactcttctaatcccagttttgaggtcagtacaacaagaaacttcccggcatttattgaccccccaacccttcctagaaaacccaagcaccagatccaaggaaagaatcttcctcaaagaaataagcagagcatgatagatggagtgattgatgctctattctattctgacttccacaggagcacagatgagagcacctacatacacatgcacatacatatgaaagtgtgaaaaaatactaaataaataaatgaatgaaattctgtcattacagaccactgagacctaccacatctagatctcatgtgtatattatgctatggaggctgtgattcatgaggacaaaacaatcatgcctgagtacagtagtaaaatgaagagagaaataagtacaggatgtaatgaaagaaacctccattctgggtgttcagagaatgctatgaggaggaactctgtcaccaaactgaggcttatctcaaccttgaagggagtggaaagtgaaagagcatgaggcacaattcaggtgcacttaagatgcacctgcttgtatattgtacaataagcacaatgaaaatactcagataccatggaggggaattcaaatatagtagatccttcctgcttctgtcaagaggtttctgtgatagtcatcttagcatgtggatggagaaaatacatgaaagtgtgcagaacaagtgtgtgtatagacacacttgcattgcaaagtagctgtgtgagcccttacagccagacaaccagaacccttacagctgacatgtagttattttcctcccaggtggttggccaactcaggactctttcaccttggctgctacagctccttccttcctttccacccttttcatctcttgtctaggttgaatcaactcccacgagactaaatattctccctgactcccaggtcagattatcttcataccaattattgccaattcttttaattcaaataccaattagttttgccatttttaagagtttattgattattcctttgataaaatctgttcatggcactccattgaaatcaggatgctacttagactctttaatgtcagtaatgcctgtgggttatcccatacttatttccttaagcttccattttgctttccaatcctagcacacatagtgacagctcatcctctcacaattttttctcattgacttattggctgctttgataatccttcattctctaatatctttgttcttcattcagaactccacttctgcccagaacactatccccagggtcctttttggtacatataccaccttcaatatttatcttttattcattttttgagatcatactgtaattacatcattttatctttccctttcttcatatactcaaatatagctatttttgctcttttttgtattgatgacctcatttttatcaaatgttacatatatgtatatgatgaatatatattcctaagagcataggcacagtctacttaatctgtataatgttgcacctgtgtatatatttagggatgaacattttgcattagataatcaaatagtgtggtctttctctgggaaagattatttctcctgctttcaggttttgttagttgcccgtagtactttctgaggttttgaggtctccaggccttttgttcatccagtttggcatgcccatggttgcgcttgttcagcttacttatatgcagtcatgttgtgagattttctgggtgtatctcttaaaattcctaggagacataatctcccagtaagctctttgattctctagctctcacaatattttcatcctctcacattcgttaatgcctaatccttggtgtgggagttgtatcatagataatgttcagtggaactggactccaactctgtattgtaattggctgcttcctgtaatgatcggttttgctgaaaaaaaagaagtttcctagatgagaattatggatggcatctatctatgggcattaaatacaaatattgagaatgtagctaaggcttatgctgctttagtaaagtcatagttatagggtcccctttaagatcaatcacttcactagccctagatcattgactagatgtccagtaccacatgtgatttatttcttttctttcattttttttcgagacagggtttctctgtggctttggaggctgtcctggaactagctcttgtagaccaggctggtctgaactcacagatatccacctgcctctgcttcctgagtgctggaattaaaagggaaccaccaacacctggcgccatgatttatttcttgttgaacaattaagtccaattagagaactgttgtttacaatgaaggtatatgtgctatcactgtacccttacgattattgtaaaatcctggttattttgatcatgtgtatcacatctgtataggactattggctgcatttctcttttacaggcttgcatggtgcatattgacaccatgaaaagtgaccctcagagaaaaggcttttggttcagttccagctcaggggaagattataagaagttttataagaagtctccctctagtttgcctcctccagtcagtgcatgggttctctgaactcagtgtgcaataaaggctcaatgtgctttctcagatgaaggtattaaatgagacatagaaataccttgcaaagcaaagatactgtgacctgttgtggtcccactgaagtctgggttcaggccctgagatgaaaaagggacttcagctcaagctgtttgaggctgcttattcgtgtgacactcatctgatatttggacacaattattcatactgaagcctctttctcaagaatttatagggggacctagaaaatgaaataggccacagggttcccaatagtgaaagtcttgcagtaacataaacagaacacacccaagtatgagaacacaacagaattgatgaaaagcaattcattatattcattagccatttctgagatttatatttctatgtttaaattaacagagtgttacttagcagaatcatgttgatttccatgagaagtgatttttatgtgtatatgtttttttgtgtgtgtgcacaggtatttttgcaaaaaatttctagttttgacttaagattttgaatttctttgtctgtcttgtgtcattttcctggatctctttagttgctctattagctcctcatgaaatctgaattctacctgtagctggggctttgctgccccatctgccagtcccacagtcacttataatataatcactcagaggcttaatattatttataaatgcttgtccaattgttcaggctcattactggctcgctgttacatacaaaattaacccatttctattaatccctgtatggccaattcactggtgacgtgcagatggaaatttctcctccagccttgttggtgtctccccttcactctgcccctctttctcccagtattcaatttggcgtttccacctacctatactctgcactgccataggccaaagcagctatcttcatcaaccaatacaagcaactcatattcacagtatatagaaggacaccctacatcatattaatatctaattttaatatctatctcctcatatgtacttattttcttgatgaaaatgtatctctgaatatttattaccattttgtaatgaataattggatatttttattaaataataaaaaaattgagtttttgactctctgaaaatcatggagtaaaacatacattagtcaatctgggaaaatgatttttatagactaataaccaaactaaagatacttttttaacacaatgaaatatttataattaatgcttacattaaaatataattgcatgatcttctgtccccttttctttccaaccctccataccatcactaaattagtggcttcattctcctccctttacctcttattaaacatagattctgttctcataccatgtcacttgaatacagtttcccctctctctgctcctagtgctttcacatctcctctcacccttgtgcactccctttctatctctcattaagaaagaacagacttcacttttgccttcttaggctctattctttttctgttgacatatttgtctaactttggtatgatggttttggggtttttttatagttattttgttgtacttgttattcttaaaactattttatagaaactatattgtccataataaaaacaaggatagactgtatacttatgtattaactcagttaaacctcataaacattttgcagtgaaggaattttcttctcctttctacatatgaggaaactgagacactatttaagtgtcaagcccaagatagcacagatgttaagtgatggaaatgccatcagatgcaaaattgtacaaattatagaaaatacacaccttgtaatgagatattaaatgcttcccagggtttgttcaaaagcatccattttggaagttcagatactaacactctacagtgtttaatgtctgaaggactgatgcaagctttacaggtagaaaatagaatgtcattttagccaaatccctattaggaaattcagagaagacaccgattatcattaaagtgcagtactttggcacctagaccagtgctgggctgagatactgacagaaatataaacaaaggaaattgggtctgagccatggaataatattaatcatgagaacaactaagtttgattacattgaatttcacttagaatttaccacactgatatgatattcagtggaaacactactttcccttagtctataaaatatcattttttcctccatctcctggaaagccattctgagaatatattggaaaaatatgtacctgggaaaaaagaggtttgctgcctcctgttgggctccaacaacttcacttcctagtttaggggttgaggaagtattggtgtgtcaatgtccctttatcttcctactttgctctctctctctttctctctctctctcatacacacacacacataacacagacagagatgcacacaatatgcacatattatgttaattaatgtggactcaataatgtcttagcagctttgtggtcacttcccactcaagatcattctaggcatctgtcctgtcaaagattttcttcccttctttgttttcaggctgtgctaaacatggtcaggaagcattatttctcctgagaatagttcaattacaagctaggttaggccagctgtgattgaacaacaactttttcctataaagttacatatccaacttaaatccctttaggaaaagacagtaatagttgtcacgaaaatctttgaaattcctatacaatgggtaatgtgctctctgaggagagacatttattgcttatgtctaacaaggtattttgtccctgtcatagaggaacaaagaagacaactaccagaaaaacagaacttttaaacattttacccacctgcaaatgtaatcccagttgtgcatgatcactggagtaattagagttacctagatttagttttccactcagaaaaaatgtcataaactatgccatttatcaaccactctcacctgtgtggttgtatcctgatgaaaggtgtgttatcatctgttttgtataaacctattgagtacctatgagaaacattgacaaagtacttttttcttctgtatttgctgtctggaagtcagacgtttccttcaggctttccactttttatcagtaaaagcaaacaaatctatagagaaataaactcttaagatgtttctcagaggatttaccaagtttccattcttgttatgggcattgccaattctcttctttgataaatatggtgattttagattgaaattcatgagtattttgtcaaatttaatttcaacatgtttcagattaataaagggaataatgaagtaaaatagaagataataccttcattgaatccattctacggtaagaattttaaataaaaaaataagacccactgcctctctacaagaaccaagcaactggtgtttcaccactcgataaactgtcaaatgtcaaattttgttccactacatgttcctgtcttgatctgctgccttatcacaaatccaacagcaaggagtcaacaaatgatgaaatggaaccttcaaaactataaaccaaaataaactttttgtattaaaaacaaatgagaaataggaaaccttataaaaataatatttactactcctgcaatatggtaagtagtaaactctcaaggaaagtgtccataatatgacatggaacttcattgcagggcaataattcttgtcaatgagatatgagcattcaaaacttccaaaaatgatggactcaatattcagattaagtaaagattaaggacagagaaatttttcagtggagggatatgtacctggctaaaatgagcatgtacaagagagccagggccactccttggacaatgagtggaatagcacaggacttttcaggttctcaatcccaaaatatcttggggtcagaagcatttaagatttcagatatttacagatttaggagtattattatacagctaattagatattttgaagatggaatttaaatataaacataaaatttaggtatattttataaaaactataactttggggagtttcctaatctaatatttatcagttttgatttatagtttctcctgaattatttgttttagcctttaaaagttttttttatcatcaagaacaatatattttctttcaataggcattatgttgattacttgttctgggatggagttttatccaaagtgccaggaaaataaagaatcaggtttggcataggggctttctaaaggtcccttagggaatatcctgaaggcaaatgattccttgataatctcttgttgacctgtgttcgtttgtccaatgcctgcttttgacacaccttccaaacaattcatgaagagggcattctatttggattctatttataaaactaattgtttccaaaaatgtcctgtttataatcccctttcaggtgatgttgtctgccactaataaaatatttgagattttgatttttatttaccctcttgaaatcaccattcctatccatgtatcatcatcatggtcatgagtttcaatattaattatatctcatatccaacactccaaaggtatttaaaggcctaattaaccttcagcatggtgcattagcattttcaaaagcaatggtttcaattattatttttttctagcttctgagtctgatatcattttatttactgctaatgacagtctttgtaaaaagtctgtgaatgctttctttgggccctgtataacttttgcaaatgattcagttttctttcctgtttctccaatattgtgtcaagcatttaaagcttctacatggcataaacccaagggggtgatcatcatattgacattgcctttctaaagtaacataatctggttctctaagaatttgatcttgggagatatgtatgtatgtatgtatgtatgtatgtatgtatgtatgtatgtatgcctttgttttatccttttgttcaatattcttagcctcttctctgaactagaaagttcattgtatttgtggtccaggccatagaacagttttaatcaaatatatccaatctatagggacaactctattacaaactgaacgccttttaattttctggttcatgaatggtgagtggatgtcatatgagactacagtttccttgaattcccctaaatctaacattttcaaaggcttccaaggaactcttataaaatgtctttcacttggcactctctgtatggttactacatacatcaacagtggatctcttaagatcttagagacttccttttagaccttaaaatgcaatgctaaatttggttctccaggtaattcctcagtctgggtttgaatggctatataatatgttttaataaatgttttctaaggcgagaatcttagcactcaaatcaaccattttaaggatcaattcaatcagaatagataaaaatgacaaggattatcaaaataataattaagaatatgctaatgccagttcagttgactatacattaaatttaatttttccaattttaaaccatccattatatagttaaacagagacccaattctctccatattattatttttgagtggatatgtggagggggaaactctttttaagtaatcatttcctttaagaatttccaattgacttacccaatcttctgacaatgtctttgaggtatgaggagtagcaggtctgaattggagaactagcttctgtccatgggctgaaagtgtcagccccaggagaggggctataggaaaatcccaaaagcctctctagtttgggttacaactgaagatggaagttaggaaacaaggaggatcctaagagagaaatacatggtcccctggagaagaggaaagggacaaggtctcctgagcaaattgggagaatgggggcagggagagggagtacaaaacagccatgtacaaaaaggaacttctagaggtatcaccatccctgacttcaagctctactatagagctatagtaatgaaaacagattggcattgacacaaaagcagacaggtagaccaatggaatcaaattgaaaaccctgaagttaatccacacacctacaatcacctgattgttgacaaagtggctaaatttatataatggaaaacagaaagcatcttcaacaaatggggttggcataattggatgctgacatgtagaagattgcagatagatacatatctatccccatgcaaaaatcttaagttcaagtgggttaaagacttcaacataaatccagccacactgaacctcttaaaagagaaaatgggatgtgcccttgaacaaattggtacaggagatcacttcatgaagacaactccagcagcacagacactgagatcagcaattaataaatcacgcctcctgaaactgagaagcttctgtaaggcaaaggacacagtaaaaaagataaaatgacagcccactgtttgagaaaagacattcaccaaccccacatccgacagagggataatttcatatatattggaatatatatatatatatatatatatatatatatatatatatatatatattccagaagctaatcaccaaaaacccaaataatccaattaaaaagtggggtgcagaactaaatagagaattctcaatagaggaatataaaatggctgaaagacacttaagaaagtgctgaacatccttagctatcagggaaatgtaaatcaaatcacctctgagatctcgtcttgctcctctcaaaatggccaaagtaaaaaacaccagtgacagtttacactggaaaggatgtggagaaaggggaagactactccactgctggtgggagttcaaacttgtatagccactttggaaatttattaggaaaatgtgaatcagtctactacaagatccagcaattccattcttagacatatacccagaagttgcacattcattcaacagggacttctgatcaactatgttcatagtagtcttgtctgtaatagccaagacttacatttgttataacagatttgtcctatgctatcagttttaggagacagagttcatggtaagaatttttcctatggaccctttcatcccactgttcctcaaaggatacatgaggggtttgagacatagggtttccagtttttataccagggagatgaattgatcatgcttgggttgttaattggaattgtggcacaggtacatgaatgtacaacagccatactgcagcagcaccactgttaggagagaggaacaggtgttgaaggccctttgtcgcccagctgcagagtggagtttgagcacagcagccactatcaaggcataggttgtatcaatgaaaaagaaaggcacagcaatggttagtgtggctaccactagcacagagagctcatggctatgacttgtggcacacacaagataaatcaccagtagaacataaccaaataaatactctattccactagactggaagacagaaagtgaagaccacaagctgtaaagacaggaacaagccaatgactacggaagccacaaccaagtggacacaaatagttagagttatgatgagagggtactgtaagggatgacagatggcaacatatctgtcagaagccatgatagccagcaggaagcagtcagcactaccaagtccaatgaggaaacccatctgagtaacacaactcaacagagtgatggtcttttctgaatgtagggtctcgtccagcatatgggaaccatgactgcagtgtacaatatttctatccctgtgaggttgcccaagaaatagtacatggtcatatattgccaggcttctttctggatggagaccacaatgaggatattcccagagatgatcaatgcataatccaggctgactccaaggaagcagagcacatgtagcttaggactgttggggaggctaagaacacaaactccatcaatactgagtggttctcccaggtcattgagtccacagatgttctctctagagtggaaaaaacacatgtcagattgttaatttaccttacctaatagacagatttttctttactaatcaaatctcaatgtagctgcaaacatataaatacttgatcttttatttttatttttatgaaataggtaatataaaaatctacatgttaatttttatttgcagttttatactgatggaatattagccaatagcatcagatcaaatgagttggctacacaaaggtattttcaaaaggcataaaacagcaattaagttcttttggtaaatttattagtaatcatcaagtaattcatgggtcgaatccactcaaatgtgtaaggaagaattccaccaatttagtcactcatatacttatttttttatagattttgcttatatgtatatgcatttccctgtcctctgaggcattagatcagtgaaatatgaatgtcatgttcacaaataattataagatgaaaaattaagatggacataaagaagccagagaaatggtcatagggcaaagttttgttcaatttagacttgacagtggtacaaacaagcttcacataatggtgtctaactttttggcttctgtaggcataatcaatcaggacaagaatggccccaatccatatttattttaccttaggtttcatcctaacattgtaaaaccatgaacaaaactattggaagccctagacaaatatttggtatgtgtgcacaggactttagaaaacctatctagcgtctttccacatgtaccttcactttctaagaagaaatagcaaattgagaatggggaaattgtactttcctaaaaaatcaaagcagaataaaaaatatactgtgacctcaaaatttcaatgaacatgtacaactctaaagaattctcttttcacttattttattaatcaaatatatatttaggaagaccaaaacaggtgtcctgtaaccttatttcaatttacccaattttaatattggtcattagtatataaggactttaaattaaaataaatctctttccaaatacccttcatcaccagaaacatttgcagaaagtcatgttactgtcacaggcatctcagtcatggatcaatctccctgttattctaatagctaaggaatggtcattacttcattcacttttcttcctctcctgaatttcaaaaatgctttaaataacttctcatgatacttacctctcttcatgtttcactacagtttcagtagaaaaggtaaaatgtgaatatgaaaccaatgctgaataggaataatattacttgtataattctaccaaatatctctgtaatgctagggaatatgtaacatctctgaatttccttacttgaaatatgggaatgataattatacataattcaaagtattattaagaatttataagggatagtaacataaaatatctactagaatctataaaacttgacctcattatcttaagttaaagggcaaccatctctctctctctctctctctacatatatatatatatataatttatttccattttgagattatttaataacaaaatattttcagtattctcattctaaataacctatgtcctatatttaactgaactatgaaaaacattttattacttaaatatatttagtattttggtatctctaataaacagatactaaagtaagcctaatacctctttgatagagggatttgaagttcatgccagaatgatatgttctgagaattttattgaaatacagcatgcttacgtattcttaacagtacatttaattaaatattcacatgggaatttatatgaagccatcaattcttagtactgaaagggactgcagaaattaactggcatagttttcactagatacttgaacctgaagaaagatttcatacataaggacatcttcaatatacaatgaatccactaaatttctagttcttgattaagcattagaagagaggattctctgaaattttattctgtaatcaactgaaactagattctatgtgacttctatctactctgcattgtaaaaatactggcatattttctctacagaaacatatcagacactaagtaacaactagtcccatgtattctttcccatttacgtttggatgtgtgtcacaatttaagcttgtacctctttgtcttatacccataggaagcgcagaatcactaaccaaaaatgacttgagaaaggatatctgttcaccatcttgtcaccctgataatctaggttagaatagcacacagatagtgtctagttagtgtcacataaaattgatcttatggctttgatattcagaaggcctcaattagaccctaaacagtgtaatcccttgagagttccatctcacaaaacttctttttccttttgtttaaagatataaatactaatattaacctaatagtgttatactaagtaaaacatgagattgtaaacacttgtcttaatatatgaaaaccaggaaggtggataatatctgctttgtctcattttttgtacctgctttaggtatggtattaacaatacccacttcatacacagaagaggataagttgaacttcatgagaggacaaggtttctattaaactgtaaacttatcaaatttaaaattttagtatattagcatttattaaaggttggttattactattttagtcaaggtaaatagagtgtgaagtgaatttagaggaacactgagtccttggggagactgctcctatgggactgagcattaatagatcatctcaaacaaaaccacagaaggagtaaaattgctttgtcaactagtcatgcctcataggttccatctccctaaagaaggtagttcagtgatctatccctttgttaccaaagaattctgagggatttattgactaatctatataaatgggcacaggagaatgtatgagaatttatagtgaattgccaaatgagtatcaccaagcattgtaaaagacaccactgtgtgaagatttattccaaaactgtcacattataaggaagaaaatattccaagaattaaaatgagacaggtaaaaataacaagaaaagaaaaacagaccatgctgacatcaaaaattggtaagaatcttaaacgaataaagtatattttttaaaaaaattgaagatttatcactaaaacaaatcataacattggaaaatgcatctctctctctctctctctctctctctctctctgtgtgtgtgtgtgtgtgtttgtgtgtgtgtgtgtgtgtattaagtctgcagtgaaagcagtaacttcttacatatacttgcaaaacacttattgagtatctgatggtagaacaattgttgaacttgtgcctgggaggctctgatgaacataaagaagtcataaatctcttttttaggctacaggataatctaaaaacatatgcccctctattttatcagaaccaagataattaaaacaaagtaaacttagatggccaacaaaatttggttaataagttgacagcatatcaaattacaagtctttccctactatatactcagtgattatgtggcatatacagcaacagttatattagattatattagatcaacaatatatattatattgtggcaagggcagagagggagaacaaggaaagagataccatcatagaggaagccattatggggtcgtcgagaatcttggcactagggaaattcccagatatccacaaggatgaccccaactaataatttaagcagtagtggagagggtaccttaactgcccttccctgtaaccagattgatgactacattgattgccatcatggaaacttcatccagtaactgatggaagcagatgcagcaaagtatggtaactaggctaaaagttcaatgggattactcagaagatgaattactccaatctgatgcaactactccacccaaacatcaggaaaaactctcctaaggttgttatacgtacaccaatggtgttcccagcaatcatgatagagaaaccaccctctaaaatgcatcctcatgggcaaatggcatatcagtggcagcccatctagttaaaagatcttaagaatatcaaggaatcagtactcgtatggtctccatagcctgtatttaaaacaactatcatattaataggcaacagggtgatgtccacagactaggaatgcctagtagtagctctgcttgaaaatttgtctcagataaagtgaagggctttctggaggaaggaggataaggccctcagagcttcaaagcataaagaacagttatgaagctccccaggctaagatcctgggtgagggcatttatgctaacccacaggttcagactgaatatgatgaccatgtaattgtccttatgcagggcagcagcctgaaatgcctgggacaaagttcatgagccagcagaaagggtgaagacttatatcaggatagaacagggatcaacagaacagttctatgactttttacaaaggctaaccagggcaatagaattacaggtaacagatctagaatcgagagaattgatcatatacaacccctgctataaatctctggggttgtgatcttttacaccaatggaatacccagattaatattcctccagtatcagatgtgaattgtgtacaatctttggatggtagaaaaaaatttagtaagacgctatgaaaaacagttaccaaccctccaggatctatggaaactaagtacaaatgatacaccctcagaagagcctaaggccctaccattaaagtggctaacagatgaacctgtctgggttggacaatggcctatgacttctgagaagttagtggctttagaaaggttagttcaggaacttctagatcttggacatatagagaattccaccagcccttggaattctcctgtatttgttattaaaaggaagtcagggaaatggagactgctcacagacctgaaggctatcaataaagtgatttaacctctggtccctttgcagcctggtatgcctttgccttccttgaaacttaaatgatggcctatcatagtcattgatctaaaagattgtttcttcactacaccattacaggataaaggtaaattttgcatttaccataccatctcttaataattcacaggcagtcaggagattccagtggaaggttttgccacaaggaatgctgaatagtcctaccttgtgccagcattttgtacaacacctttggagataatttgtaaatttccacagtccattctttaccgttatgttgagggcattcttatagcagattctgatatggaaagattggaatgaatgtttgagatggtgaaggaaattttgccttattggaggttctggattgccccagaaatgatacaaagaggagattctattaattatttaggttacaagatagacttacaaagaatcagacctcaaaaggtacaaataaggagagattatcaaacccttaatagtattcagaaattattagggaaaatttctctattacagacaataattggtgtggaaggacatgatttaaagcatttaaaactggcccttaaaggggacaaggacttgaaccatctgtgaatattatccgatgaagcagaaaaaaactgcaatggtggaaagcagaatactggatgcacatgtagattgtatagaccctaatttagactgtattctggtcatcttaccatacagagaataccattctgggattatgatgcagagagaagatattatattggagtggatatttcagccacataaacagaataaaaagctaaagaaatatatagaaaagatttctgatttgattctaaagggcaaatgaagcctccattaactgactggtaaagattcagcagaaattatacctttctttaactaatgaggaaattttctccctatggaaggacaatgaatattggcagatagctcttactgacttttttgggaaagttagcaacaattatcctgaaactaacagaattaaattcataaaaaagacaatctggatccttccatatattgtaagacaaactcctatttctgaagttcttaccttctacaccgattctaacaaatcaggtaaggcaggttataaaacaggtgaggtaagtaaaatagttcaaagtccatatacttctgtacaaaaggcagaattatatgtaattcttatggtacttagggagtttacagagcctctcaatatagttacagattctcaatattcagagagagtcatgttgcacattgcgactgcagaattttgttcctgataatatagaattaactttgttgtttatacagttgcaggacacaatcaggaatagaattaatcctttatatataacacatagcagatcccatatggttctgtcagacctactagcacaaggcattgatgagattgaccgtttattaataagaaatgtgctacaagcctcagaatttcacaagaagcatcacgtaaatagcaaaggtttacaaaaggatttctccatcacttggcaacaagccaaggagatcttgagaaactgtcctactttttctttttataatcaaactccattgctagcaggctctaatcctaaaggtattcagagaaatgaggtttggcagatggatgtctttcactttgcagaatttggaaacttcaaatatgtacattatactatagacacatattcagggtttcaatgggctactgcccttaggttgaaaaggcagattctgttattaaatacctgctagaggtgatggctgttatgggtatacctgcacaaataaaaactaacaatgctccagcatatgtacccattaaattggaacaatttttcaaatagtataacataaagcatgtgaccagtgtaccacacaatcccacaggacaagctctgttagaaagatctaacaggacacttaaagaaatgctctataaacaggctgggaaaattaaacaccccaaacataggctacataatgcgttattaacactaaactttcttaatgctaatgagaaagggcaaacagccccagaaagacactggactatggaaaaaactgctgaactgaatcagacagtgtacttcaaagatgtattgacctctgtatggaaaccaggacatgtgttatgttggagaaagggtttcacatttgtttccacaggagaagaaaaattttggataccatcaaagttgatcaagattcaagctgaaaaagagaaaacttttgacgattagaaataataggtattctaccaaggtatatctcatgaactggatgggaacctcacaaaggaaagggaagtgttttgtttttgttttcacagaaaaactcatccccacaagccaaaggacactatatgggtagaagagaatgcagctataaccattaaataatggaaaattgccatatgttagaatttcgtagatgcatctacacctatttctctgtttcctagttccattcaataaaatcaatgctggatttggagttgatttggctttcctcctctaaatccaagcacattgttaaaataaacttcagactttatgtattatgtcaccaacagtgacattctctaaaggaatgcccgtcaatataatataaaaacattcagaacccaccaatagttgccactagatgtatgaaaaagacctaaggcaaagtagtctactagataggaggtgaaagttatagtccattaagatatatgctgcttttgaactaattggtacaggagactgtttcctgaacacaacactgtagcacagacattgagatctactattaataaatgggacctcctgaaactgagaagcttctgtaaggcaaagaacactgtcagtaagacaaaaagacagcccacagaataggaaaagatctttaccaaccctacctctgacagagggctgatatctaaaatatacaatgaactcaagaagcgagccaccaaaacacctaacaatgcaattaaaagatggagtgcagaacttaatagagaattctcaacagaggaatccaaaatggctgaaagacacttgagaaagtgttcaaaatccttacccatcagggaaatgcaaatcaaaacaactctgagatgccatcttacactggccagattggctaaaatcaaaaacaccaatgacagtcagtgctggagaggatgtggagaaaaaggaatacttctccattgctggtggaagtgcaaacttgtaagaccactttggaaatcagtatggtggcttctcaggaaaatgggaatcagtctacctcaagatctagcaaatcctctcttgggcatatacccaaaaatgcacattcatacaaagaggacatatgtttaactacgttcacagcagtaatgtttataatagccagaacatggaagcaacctatatacccctaaactgaagaatggatagagagaaaatgtggtacttttatacaatggagaaaaaacaatgaaatcttgaaattcgcaggcaaatggctagaactagaagaaaccatcctgagtgaggtaacccagtgacaaaaagacaaacatggtatgtactcactcatatatgaattttagacatagaacaaagtattaccagcctacaatcctcatcaccaaagaactatgaaacaagaaggactctaagagaagaatgcatgtaccttggagaaggggaagggtaggatctcctgaactaattggaagaatgagcataagggagagggacctaggagaatgagagggggagaagaggaggggagaggaagaaatggaggagcaagaaggttgagtctggggaagaatagaggagaacaggatgagagataccataacagagggagccattataggtccgaggagagatctggcactatggatatttccagagaactacaagaatgacatgaactgacaatctaggcaacagtggagaggctaccctaaattccctttccctatattgtgactgatgattgccttatatgccatcctagagccctcatccagggctgatgtaagcagtggcagacacccacatctaaacactgaactgaactctggaacccagttgcagagagggaggagtgaagagcaaagaggttgggtccaggctggtgaaacccacagaaacagctcaccttaacaaaggggagctcatggacaacagactgatgtctgggaggccagcacgggactgatccagacccctgaatgtggatgtcaatgaggaggcctcttcactctatgaggcccctggtagtgaatcagtatttacccctggcataagaagggactttgtgtgcccatcccacatggcagaatgttctctcagcccagacacatgggggaatccctaggccctgcccaggatgatatgacagactttggggaacctccatggagggccttaccctccctgggaagcagaggggacatgaggtgagggtctggtggggtgttggtgggaggggagggagagggagaagtgattgacatgtgaagcagccttgtttctaatttgaactaataaaaaaataatctcttggggaaaacaagatatatgctgctctcccaaagatattaatgagttttctaattattcaatcagaagtctggggaatatgtgtgagaataaattttaatcttgtggaacaatggtgaaaggaacattaaactggatcagactgtgtttgttgaaatggcctctttgagtacagattttgcatttgaaatgtaagttcacatatgtagggagctgcagaaaaccgcacccaaaagatggcgccggtttccgccctccgccagccgacggcgagcgctctctgtggtaaacaactccaaattaggcaaaggtcatgtatcctcttaattctgcttggagacaacctatcctggcgcgccacgtagggttaggtgattggtagatgtagactatatcaggccccgtctccctcggcccggggccgctgccgccattatacattgtacaaagcaaagaggttcccgattaaactgtgtttgaagaagattcctcggtgtggcgtctttcttgctggtcaagggtggacgccgcacacatagttataagaagtgtcaatgatttattagaattgttgattgaaatatctttcaagagatgggctcctgaaaagcaatttgtgatgcttgatatttgtgggcttattgttaatgaaggtatgttaaggctcagggagactgtaatactagactagataaagtgcataaaacttaatcctatataacgggaaggcccagaagcatagcctaaaggccagactttcataattaatagtaagtattcctgtcattatttaggattcagataataaaacccagtgtctgtgttctgagaaataaaaataaaatatttaattaaaaataagtagaactaccatataatctaactagaccacttctgtatatattatgaaagaaatttaaaaaaaaacaagcccctgaagtatctctgaattcttgtttattgcagcattatccacaatactcaagtgatagcccaagtagtggtaccccacaatagagaaatatgtaaagaagctgtattgcatgtgtacagtggaatatacagccatcaaagatcacataatttgtcataaagtgggatgaactagatgtcatcatgataagtcacgtattacagagtcaggaatataagtattgaatgctttttgtgaaagttttcattaaaagtagattattgtctcaaacaatacatcccaactacatttcccctccctcaacacctcctagtactctctcatctaccctctacaccagatctactctccctctgttttcttttcagaaaagtgtagatctcaaagaaagaacagtcagataggacaaaacaagatacaagaagggaagacagaagctctaataccaaaactagaaactataacaaaaacgagtaacaagaaatgtcaaaagagtcaaaaatatacctgctcacactgtgagggtctggccatgtcataaagctgaaatctatgacattatgttcaaaggacctgatacagaccaacgtagattaaggccatgtgattcatgattaattgatttggtatgtcatgctctcctggtatcccctgccctctcaaactcttgcattcctgcctcccatacttctatgtgtcccctgaggtccacaggcaaggccccaatggagctctccaatttagaatctcactatgcatagtgttcaactgtgcttttctctacttgctcccattcttggctggaggaggtctttctgatgatgactggcgaaggcacatatctattaatataaacataatagaatatcattacggggctggagagatggctcagccgttataggctaggttcacaaccaaaaatagaatatcagtaggaattatatcatcgaccttccttatttccttcttttgtctgtccatctgtctgcctgtctttgtgttgtttaaccatcattgctgttctttctttctttcttttttccagttgtgtttggtgctgtgctgcccagtatccagttccttgctatccaggaaatgtaggacatggaatttgtttcttggtgtagtcctcaaattaaaccagaaatttgatgacaactcccacaagttctgcaccaccattgccccagaatattttataggcagaacagaatatgttataaggttttgtggctggattagtgtccagatgatacattgaaatttgaaggcaaatgattggaactagaagaagccatcctgagtgaggtaacccagatacagaaagacaaacatggtatgtactcactcataagtggatattagacataaataggcataggataaccagcctacaacccacagcccaggagaagctaggaaacaaggaggactctaaaagagtcctacgtagaccctataagaaggggaaaggtacaggatctcctgagtaaattgggagcatggaagaaggagaggtagaaatttcagtttttattcttatggaaagaaaataaacaaaggaaatgaaattgtttatatactctcaccaatttcaattttttttcattaaattaggactggaatctaaggaaaatcaccaaagatcaagttaactttcttgttgatttgttgctagactttgttgttagactttgaagctcataccacagataattgagggagttccctgggagagacttcttcaatcttcttacagcagaaaatataatgagagtccatgaggtttatggtcagccacatacagagggaaacaagaagatgttatatgctgacttcctcataaagttaaatgacagtagggtgtgttctttatatgttgacactcaggagtagataggctccttaaaattagtgtctgggatagaattgagaaaaaaaaaaaagacaacaaccaaaaccataatatcatggaataattcaaatttaagtcatgattgattagacatatctttttgtataatataaagtagattctagtacaattactaagtttaatcttgcctcctctagtaatatttttgaatgttcttcatgaaaactaatgagtccctcaaggtgaggtaaatccctagtttgatctcttaatctcaatgcaactggagaaagacatagtttaataattacttctgtgcagccattataaaaactggtgccttgggattccaggaagatatctctaacttctagctgaaacccaatagagacttgctgatgtaacattccacataggttacctcatgagagctcctgaaggcagatgatccagtaagctttgactcttgaatgtttgtacacacccaacactagcctggcacctggagatcttccatattagttgtggctctcatatctagtgattgctgtggtcaggcccatagtgaagtacttaagtgggctttcttatctattttagaagatgttggattacatggactccatgagtctgttagatttacaatccgatgaatcgtaatgtttaattgaaaatcagagtttatggaggaattttccatccattctttgtgatgtttggtgaatttttccttatcttacttgttttaatttctaatgaatttcccttctgctgttttctggctattttctctcacccccatccccatatgtttcagtttctgtacttcaatgccttcacagaagttattgtatgaactattttatcaacctctacctcattcatttgatagcaacctggagttatggtcacgatctgcaaacccagtaattctctagtctttaccttccatttcactggggttatagacatgcacaacatatccagttttctggggcttctagagttttgaagacagtacctcatgcttgctcagcaagggctcttacacgcacaatgatctcccctgactgatatctggcttgttagactttgaagctcatattttcattttaatttgtttttaaaattgataactattccccaactcttagctcagctataattttcttgttactatattttctttttctactttcatgtttaaatgcatgtacttaacttactattgatgctattaatttttataaatgtgtagttaccatgtcccatttctaaaatcaatagattatatctttttagtacatcaaaagaatttattgaattgcactatgggaaattgtagttttcaagggttatatgtactagcattatcagattttatgtacagtgattatatttcttggtagaggaaatcagatacttaattacaaaagaggtggattaattaatggcatttcagaaatgagaacataaattacatgaggcaagattccaaggagaaaggtctataagggaataatctgtgatctgagtgacttgctacccagaggaaaggtggaagtgaactgttttaaaatagaagcagagaaaagcaaaagctccttcatcaaaataataattgagataatccccccaatggaattgtctttaaatatatgcaagcaaaattgatttgctaatatatccgtgctgatggttaatccagaattgatactggatctcagggcatgcaaaactgaagggcattttattgaatattacaccaaaattactattttctttaggttctttgatgttctttcagtttcttgagttctctagaattagttatgtcatattcagaatatgcaactaacaatgtttcatggtcgtttccaaagatggattggtctgagtatcttatcctgaaataggtttgggtcagtgattacaggggtagggttaacaaagggttgccattttcaactgattaatcacaagcatataaatttgatcattttaaaacttgttgaaattctgtcatcatataggttactttataatgtgagtaaaggcagacaaactaaaatcttgaagagagtcctggagcacatagtcatttgagtagcagaatgaagagatggactgactaaaggcgaaagaagatgaaaatgaagaggtagagggtttattttgtgtattctttgattcttttgctttaaaaataaattttattggtcacatttaagttatacaacataaatatttgggacacatagaagaaatattggtatacataaaaattcattttttcctctattgagaattgtctatttaattttcaatagaggaatctaaaatggctgaaagacacataagaaagtgttcaacatccttagtcatcagggaaatgcaaatcaaaataactctgagataccatcttaatcctgtcagaatggataaaatcaaaaacaccaaagacagttcatgttggagaggatgtggaggaagggggacacttctccactgctggtgggagtgctaacttgtacagccactttgaaaatcagtatgacccctcaggaaagtgggaatcagtctaccacaagatcctgaaattccactcttaggcatatacccaaaataagcatcttcatacaataagggcatctgttcaactatgttcatagcagtctatttgaaatagccaggacctggaagcaacctagataccgctcaactgaaaatgaatagagaaaatgtaggatatttacacaatggagtactactcagcaggaaacaaaaaaacaaaaaaaacaatggaatcttgaaatttgcgggaaaatggatggaactagaggaaaccattctgagcaagggaacccaatcacaaaaagacaaacatggtgtgtactcactcatatgtggattttagacatagagtaaaggattgccagtctacaatccataccacaagagaagctagtaaagaaggaggaccctaagagagacatacatggtcccctggagaaggagaaggggacaaggtctcctgagcaaattgggagcacggggaggggggttgaagggaggtaggaaaatgagaagggaagacaagaaggggtgaggaggacatgagggagcaaaaagtttgagtcggcggaaaaacagaagaaaacaagaaaggagataccataatagaggaagacattttaggtttacagagaaatcagccattagggaaaggtctgtagatctacaaagatgacaccagttaacaatctaatcaacagaggaaaggctaccttaaatgccctcccctgatttatgaaattgatgactgtcttatatgccatcctatagccatcatccagcagctggtggaagtagaagcagacacccgcaactaatcactgaactgaacaactggaatctagttgcagagaagaacaagtgatgagcaaaggggtccagaacaggctggtgaaacccacagaaacagctaaactgaataatggggacctcttggtccccagactgatatctgggataccagcatgggactgatccagaccttagggaagtgggttttagtgaggataccttgaaaatctatgggacctcatgtagttagttcagttcttatccctagcataggtgtggactttgggagcccattccacatagagggatactccctgagccaagacacacaggggagggcctaggccctatcccaaaggatatgatagagtctgatgacccctatggaaggcctctccctccatggggaacagaaaggatatgtgataggtagggttttaggtggagggatggggagaagggtggggatagggaactgggattgacatgtaaaacaatcttgtttctaattcaaataaaaaatctgaaaaaaaaattcatttttctcaactatggaaagcacaactaaaacatacttgtttttaaaaatcccattatagtataatttcattaattataggagagaaagacatacataggaacaatatactgataatttctgaattgtttcagtagatataacacctttatgcatacttgagctatgcatgacaaagattacaaacacaacacatgtaatcaatcaagtgtacttccatttttattaaatcattgaggactgattgtagccaatacacacacacacacacacacacacacacacacacacacacacagacagacacacactttttaactgtaacacgaaaaataaaagaaccagagactgatattgggcttccactttcaagctgaagatcagagaagcaaagcagccagccactagctcttacctctacctcagactgaaaggtgatcctgcctcaaccaaacctcagactgtaatcctagactcctatgctctcctcaacatggctggagatacctgagactgaatgcctgccctgagaccttgcttctgttttatatgccacactaatgctgggattaaagataccgttatcaaagatgctgggaacaatggcatgagttctgttactctttactcttacgtaggtcatggtggccttgaactaacagagatccatctacctcttaatcctgaggcctgggattaaatgcttgtactactactgcctgatctctatagcttgatgctttgtttgtaagtcctcaggtgaactttaatacaacataaacaatacataaccacaatttctttttttggctaatacaaaaagaaaagctactaacgtaagaaaaattatgtacaatatacacaggcagtaaattcacccacaatgtctagtccacttgcatttgacaaattcagagaaaatacttcattatctatcctatcttggtgagtccaacatcttgagcctaatttactttctattctaattttcattgtcaaatatcttttagtgtctttcaaaccacttatactttacatatctttagtgaatttcttttgtgatactggtaaacaaataaaaccataatcatctagtcttcatctccctcagataaatgagaaggaaataatattaattgagtaaacgggaattgcaagcaagtgatgtctataaaatgtgagaaatgacaaaaacagctgtctgtctgaacagtcactgatgatttctatgcaatgttggggcatccatctttgccttataggtctagcatctctgacagaattttctgtgaagcaggattttctgaagggttttccctcttgtcttgacaagatttacagtaactctttttggtgtcctgtttgtccaatttggacagcatactgtctgcagttgaagcaagggaactttcttgcccagtggctacttttaccacaaagaaagtaaactccgtgtggagtttattgatgcccatcatcttctctgaagttgattggtgctgccaagaggacacaagtttcattgtcataaataaataattatgttactaaaacattttatctgccattttctgtagactctgaagtgtttgaagatgacctatctatctaaaatatatgtctgttttactttgaaaacatatctagtgtgattaattgtgataggtgactaattatttacttattatcttatattgttagtaataaaaactttaaagaactagaagtttgcattatattgataaatgaactgtataagtacaacaccttgaacaagagtagaagtgctgcacaatatgtcttaacaaattaatctcaaatttatatcaatatacactatttgtatacaatatacagaactccaatccaatgaaaaatatttaaaaagtagtagttgctttttaaaagtagactcaataatctaccttttcatcttatcatgtctagatcctatcttttttctcttctgagtagattcagtaatctacctttttatcttatatctatattaccttcttttcagaacaagaaccttaaatctaatcccccttgttcaacattcttcctgaccataaccaacaatattttgtatccaatctccctaaacaatgacaaatatccataacccaattgtatgtccaaaaaatcactcaccacactgcttgagaatgtgggcattgtgttcttaaaattgcttcctgctgtttgggggtgatggtatctttaggggagcctgaaaagaaaaatttgggttaattgtgcagctttatcatatttgtccagtctaagcatggtgggaaaatacagggcttgtcttaaatcctggctagagtagtctgtgaggatggatcatctcagctagcctcatcaaaactgttctactcagtttttgtgaggctggactatctctgttggtcatttcaaaattgttctgagaagtttatagtccaatgttgatctttagtttgtattgttcagcttaatggtgttatataatgcaggtgaaattgttgtggggtcccatattcttttttgtttgtttgttttgttcttcaagagaggttttctctgtttttgacagtcatggatatcctgaaactgaatctgtagacctgcctggcctcaagctccctgagatcctcctgtctctgcctcctaagtggtggcattaaaggtgtgcatgacctccaccaacttggattcagtcttatatttggagacttcagagatcacctcaggtcagattattcccttttttagtaatttttgtcggctatttttctcttcttgtttggatccttattttgttcaaaggtctttaaattcttcaagatggtattttattttccttaaaagacaaaatgaaaaactttccccagctctaactttggggagtttactaatctaatctttatcaatttttatttatggtttctctgaaattcttgttttaggttttttctatcacccagaaaaatattgttttcaataggcattatgttacttaattgctctgggaaggagttttatccacagtggtaggaaaatgatgaatcagttttggcataggaaatttcaaaaggtccctcaaagaaattactgagggtaaagtattatcaaaataatatattgctagcctgtattattttgtccaatgctgcctttgccacaccttctgaataattcagaatggatggacattctgtttggattatatttatataaggaattgtttctcaaaatgccctgtttacattcccttttctgatgaccttgtctgccacaattaagacatttgacattttgagttttgtttacactcttgaaatcattcaatcctatccatgtatcatcatcgtggtcatgagtttcaatattaattacatattggatctaatcctccaaagtagctgatcttccttttaaggacctatttatccttcttcatggtgcattagcattttcaaaagccatagcttcaattattgcttttctagctttggagtctgatatcattccatttactgctaatgacattctttgtaagaagtctgtgaatgcttcctttgagccctgtataacttttgtaaatgattcagttttctttcctgcttttccaattctgtcctagcattcaaagtagctgcaaggtttaaacccacaagatgttcatcatattgacattgcctttctttctttctttctttctttctttctttctttctttctttctttttttgttttttgagacagggtttctctgtgtagcctatcctggcactcactctggagaccaggctggcctcgaactcacagagatccgtctgcctctgcctcccgagtgctgggattaaaggcgtgcgccaccaacgcccggcgacattgcctttctaaactaccatattctccttctccaagaagctgttgtataatctcatttggcacttcctgtaaggttactggatatatcaatggtgtttctcttaagtccttagagtgttcttttttaagctttaaatgcaattctgaattttattttccatgtaactcctccatctgggtttgaatatctctataatatgttttaatattttttactaaggcctgaatcttagcacttatatcaaacttttaagagataaaccaggatatatcaattacaacaaagattatcataataataatgaacagtatgtcaatcccacttgagtttattatcccttaatttactttttcaatttttttaaagattttatttatttattatgtatacaacattctgcatctatgtatatctgcacaccagaagagggcaccggatttcataacggatggttgtgagccaccatgtggttgctgggaattgaactcaggacctctggaagagcagtcagtgctcttaacctctgagccatctctccagcccctactttttcaatttttaatccatgcattatgtaatcgttcagagatttaattatctccattttcatggtgttttctattttttagtgtgggggaaaactctctcttttttttctaactaattccttcctttaagaattcccaattgacttgccaaacctgctgacaatgttagtgaacagtgaggtgtagcgagtctgaatcagggagctagcttatgtccatgagctgagtgtatctgcccatggagagtgtcagcccaaggtgtaggaaaagcccaaaagcctcccaaatttgggtggctgctgaagactgtttaggaaagattcaaccaaaaaaatcccacatttgcttaaatgtttcagaacaaaacctagctggtcaggcaggtactaaggcaggcgggaatcagggggaggcagttgtgcttgaagctcaggcttggacctgagccagtggcctcaaagagcctttttcataaattcatacattaacttttggtaccaattgtaagaaaaaataagaggcagagaatgacatggggttcaagcctcaagcaaagtagccagccactagctcttacctctaccacagactggaaggcaattgtggctcaaccaaacctcagactgtaatcccagactgctaggctctcctcaacttagctggagataccagagactgaatgcctgttctgagactttgcagatgtcctacatacctccctaatgctgggattaaagaagtgtgatccaaggtgctgggatcaatggcgtgagttctgttattctttacttttgtttatgtcatggtggccttgaactaacagagatctatctaccacttaatcatgagtcctgggattaaaggtgtataccaccactgcctgatctctctagcttgtggctgactttgctttctaaaacttcagctatgaataatatataaatataccaacacatttaactttctctaatgcattgaattctctacaggactcctcaattcattaaacaaaacctcatcttcacctataaacacttgtaaatacacagttcacataaatttctgttgtttatcctttcaaaaaagcatctggatatgatttcttgatgttagtttgaaaataggaagcttattaaatcattcttctattttttttctttggtttttttcgagacagggtttctctgcgtagctctggagcttatcctggcacttgctctggagaccaggctggcctcaaactcatagagatccactgcctctgcctcctgagtgctgggattaaaggtgtgtgccaccaatgcccagctaaatcattcttcttaaacagaaatgttgctttctggaagattggcatattaaagaagaaatcttgctaaaacattatgtcttcaaatctctgctgtgactttgcatctcactccaaataaaattaattttcattattatctataaatatcaccagaatcttggttctgagtaagttgtgatctcataccataccataccatatcactcacttgctgttttctcttgttttggccattcaaacagcatcaactcgaccacatttgtaatgtgtgtgtgtgtgtgtttcacctcccaaatatgtacatacaaagaaacatacacatttgtgtattcataccacaaaacatggacttacaaacacacaagcataaattattatgtattttatcatgtataaattaatttaatatagaacatgattatttaattttttgaaaatactgttatccctgaaattatgaaattcacaattaaatgaacacatctataaaaaaatcatcctgagtgaagtaactttcatttcaatagacaaatattgtgtattttctcttacatgtagatgttagctattaatcattctataaccatgcttcaatatgtacaaccaaagagattagttttagagtaagtgagtaggtgagagatttccctaggaatggaaatagaatatatagttatggagagatggtggagagattggagggttgacaactttagttaggcatcagcttgaattttccatgttcaatgtgctatgtaagaggtgtcttcagtaatagaccttacctcctaactagcattcagtgtactgaaatatactctgcatacttcaagagccaccaacccacttacaaaccctatgatttacattggtgatttgtctgcatgatatgcttgtgcaatagtggcacaaatgttgtgagaccaaccaagtactctctggttgtgtttaaagcccactgtataatctggaacccattcctgacactgctcaggtagccaaaaaaaaaaaacaagagaattattagttcatggtcttattgaaaaaccaaatagtactttgatgagataccatagcaataaaataaatcctttgatattctgctatacccattaatcagtgtcttgcacaaccatcaccagagaaacttcctcttataatatttaggaactaatacaggaacccacagctgtacaaggtgcagggagtgggagacttgggaacactcaatttggattgttctgtaatgtaaactgctggaagcaaggagaagattagacataaggaattggggtatgaatgttcaacaaggtagtgtggtcttgtgaacttcttttctattttttattttattttaattagaaacaagattattttacatctcaattccaggtccctctccctccccttctcccctatgcccccaactatcaccctacctatcccttaccctttctgctccccagggagggtgaggccttccattgggggtcttcaaagtctgtcttatactttgggatatggcctaggccagcccctttatgtctaggctcagggagtatccctctatgtgggatgggctcccagagtccattcctatgctagggataagtacttgtcttttatattatatttctgattcattttgtgtttttatgaactttggtgtatgtggtatgagtgtgtgtttgtgtgtgtggcttttgggtattctatttttattatgttgggtttgtctgtttgtaaaaatgaatatattgagttatccataaatttaaacaccatctaacttttaaaggtgtaaccatttaggatttgagccgtagtattgtcagaagattaatactgtatattataagagtaagtagtagataatgtaaatagaaaaccatgtaaagacatagaacatttaaaacatttactattatttaagaatcataattcatgtctgtattttcaatccttaagaaactgaggcagagagattgcacatgtgaagccagccagccttcacatacacacatacacaaaacaaatgaaaatgaaatctaaaaaaaaaaaactattagctatgctaaaattatagacatcgtttgtgatctataatatgcacattctttccaaagtcatgaggaacattcagtcaatcagattttgtgtcataaaacacaactcaatgctataaaaattacacacaggaaacaggccctcttgcatccagttggttcccaaagtacaggactaaacaaatgatacaaaagatattgtgatactgtcctccctgtttcctttgttatcttgttggtttaaagcatcattatgccaatcaaagttatcattcctggaatagattccattttgaatcctgttctagatagtttttgctaagagtgcacctcttcttactttgtaggtgttttaatgaaaaaggccttctgtggtcaataatttttaagaagtgcctttatagtccctggatctcaagcactacagacaattacaaagttttgtcattttatctaaaactaagggaataagctaaatcattccttctacttatttatataaagttgtatacctgaatattaacattatttcctgcatatgtgtttgcttatatctctcttacaaaactagctgcgcattggtggtgtacgcctttaatcccagcactcgggaggcagaggcaggtggactctatgagttcgagaccagcctggtctacaagagctagttccaggacagcctccaaagccacagagaaaccctgtctcaaaaaaccaaaccaaaccaaaccaaaacaaatcactcaaaaagtagcacgtggtaaagaatgtcaccatatgtagggacaatttttacactttatgttctttgttttttatgaacatcatttcacatcagatgagtctacttttgtagtggcacagggatttgttttagataagacttaactttgttatatggtatttttcctatgctatcagtttttcggagagataattcctggtaaggattttacctatggcccctttcatctcactattcctcagagtatagatgagggggttgagaaatggggttcccagtatgtacaccatggagatgaattgatcttgcttggggtggtagttggagttggggcataggtacatgaaggcacaacatccatactgcagcagtaccacagtaaggtgagaggaacaggtgttgaaggccctgtggcggccagctactgagtggagtttgaacacagcagccactatcaaggcataggttgtagcaatgaaaaagaaaggcacagcaatggctagtgtggctgccactagcacagagagctcatgtatatgacttgtggcacacacaagacgcatcacaggtggcgcatcacaaaagaaattgttctatccccctgtcctgacagaatggaagacagaatatgaagaccacaagctgtaaggacaggaacaagccaatgaccacagaagccacaaccaagcggacacaaatagttacagtcatgatgagagggaactgtaaaggatgacagatggcaacatatctgtcataagccatgatagccaggaggaagcagtcagcactaccaagtccaatgaggaaaaccatttgagtagcacagctcaaatggtcttctctgattgtagggtgttggatagcatgtgggggaccaccactgcagtgtagcatagttctatccctgagaggctgcccaagaaatagtacatgggtgtatgtaggtgggcttctttctggatggagaccacaatgaggatattcccagagatgatcaatgcataagccaggctgactccaaggagcaaagcatacatagctcaggactgttgggataggctaggaacacaaactccatcaatactgagtggttctctcaggtcattgattccacagatgttctctttggagtggaaaaatacctgtcaggttgccaatttaccttattgatagattttacattactaatcaaatctagatttagatgcaagacagatatatatttgatcttttttatttttataaaatcagtgacatgaaaatctacaagttaatttctgtctgcaaacagtttggtactgaaaaactattagccaacagagtcaacatcaatgggttggatgcacaaagatattttcagaagtcatggaaattaaattaaatactttcaataaacttactagtaagcatcaagtaattcatgggtcaaatccattcaagtgtggtagggaaaaattccaccaatttagtcactcctataattatttttttatagatttcccttatatgtatatgtattttgctgtcctctgaggcactaaatcagtgatatgttagtatcatatttactgataatcataagatggaatattaagaaggaaagagataagaaagaaattatgagagaaatgataatgaggcaaatttttgttcaatttagacttgacagtgataaaaacaagatgtagataatggtgtctacctttttggtttttctaacttatctaatcaggacacaaatgacaacaatgcatatttttttttaccttaggtttcatcctaacataggaaaaaatataaacaaactactggaggcacttgaaaaatattctgtgtatttgcacaggattttagaagacccaccaagtcttttccacacttaccttcattttccaagaagaaatgtgcaattgagaattgaaaattgtgctttcccagaaaataaaatcagaagaaagaatatacagtgacctcaaaatttcaataaacaggtacaactttaaagaattctcttttcacttcttttcttcaacaaatctatatttaggaaaggcaaagaaaggtatcctgtaatcttatttcgatttacccagttttgatattggtcattaattaatatggtctataaaagaaattggtttccaagtacctttcctcataagaaatatttgcagaaagccatatcacatgcatcttagtcatggatgactctctgttattattatagctaaggaattgtcagtactttattccttttccttcctctcctgaatttcaaaatggtttaaataatttctctgatacttagtactctacatatttccctagagtatcaggaggaagggtaaaatgtaaatatgaaactaatgatggattatgaatagtgtgatttgtataattctacccaatatctctataatgctagggaatacagaacttctctgaatttcattttttcttacttgaattatgggaatgatatttagacatcattcagacattatcaagaatttaaatgggatattaatataaaatatcagaatctagaaaactttacctcataatcatctgtaaattcgaggtcaaccacctatttatattttcatctttctgtaacaccgtggaaatgataggcttatacataaaaatgcatactagatatataatatttcatgaaaactttttatttccattttgagattacttcataataaaacatattttagaattcttaataaaaataacctatatcttataatttaacttcactacaaaaatttttattaattaagtacttactatttttgtgtttacaataaacagatatctaaatgtagcctaacacctgtctgatgatggagggctttgaagttcatgccagaatgatgagttctgagaattttattgaaatctagcatacttgtatcatcttaatagtacagttaattaaatattcacatggggattatgtgaggccatcaattgttagtgctgaaagggaaagtagaaattacctagtaaagattttaccaggtacttgaactttaagaagattcagtacataaggacatatgtacaatgaattcaatacacaatgaatctactaaatttctaattcttgctttagtaatagaagggaggattctctgaatttttattctgtggtcaactgaaacaagattctacataccttatatctactttgcctcatctaaacactgttatattttctctacagaaatacttcagatactaaataactatgcctgtaggttgaagtactctttcccatttactttcagtactgttgacaccatggtttgggtgtgtgtcacaatttagacttgtttctctctgtcttatatctataggaggtacaacatcactaactaagaataacttgagaaggagtatctctgcatagtcttgacaccctgataatctaggttataataacacacttctagtgtctagtctagtgtcacataaaaatgaaattattgctttcaggttcagaagacctgaattagacctgcaacagcataatcccttgggaggtccttctcacaaaagtctttttccgtttgtttaaagatataaatactaaaactaacctaatagtgttgtgctcagtgaaacatggggttgcaaacacttggcttgatggatgaaacccatgaaggtgtatatctatttgtttctcatttttgtaccttctttaggtatggtcttaacaatatgcacttcatagaagaggataagatgaactccgcaggaggacaagggttctattaaactacaaagttacaaaatttaaaattttagtatattaacatttattaaaggttggttattaatattttagtccagacaagcagaacatgaagagaattcagaggaacactgagacctgggctaaagtatttctgacacactataatctatgcatgaagccatcagtttcctaacagtagtatcaatagtttgaaaatcaagggatagaaaaagaggtctcttaccttcagtgtggagagagaggaggtttaataagtactcaggtttacctgcaagagcacctaaaatatggtgactcactattcttgtgacccaacatgagaagacagtgatcttgggggtgacttctcttatggtactgagccttaatagatcattccaaacaaaaccacagaaggagtaaattgctttgtcaactagtcttatctcagaggttcgatctccctgaagaaggtagttcagttattgccaatctatccccttgttaccaaagaattctgagagatttgactaatctatgtaaataggcgcaggagaatgtactattatgagaatttatagtgcattgccaatgagtatcatcaagcattggaaaaggcaccattttcacgaatcgcatgaagacctgttccaatactgacacattatcaggaagaaagcatgccaggaattaaaatgaaaatactaaaaataagaaggaaagaaaaacagaccatgttcacattaaagattcgatgaatcttaaataaagactagtttttaaaaaattgaaagtgtatcactagaacaaatcatagtattagagaatgcaccctagtgtaagtgaaaattaagtctgcagagaaactggtactttacacatccttgaaaaacacttatttagtatctgatggtagaataattgatgaatttttagggaagagaaatgtatactgtatttcataaagtataaagcagttaagatacagccaatgccataatcagcccaagaaaacacttggtttctttctcaacacatgggtgtatatgtatttcattcaaaatttttgttttgtttttgagattgtagtataattatatcctttctccttttcttttcctcctttcaaactcttgcatattttccttcttgtgctttttcaaattcatggctttcttgattatataaagttattttacatttgttttctgaactgatcatttggtattagatacccaatgttttgcttttccatggagaaaactatttctcccactcttaataatccttagatgtttgtagttctttcaggtgtagggcttgaggcttcttgagtttttctctgttctcattagcatgcctatgtttccttgggttagaggtataatagccacttagggaaatggatttttaatcacaaaatattaaaaagtgataaaataattgatgtatatgtgtgtctatatgaattgtttaaaattctagatgtcaaaaatagtatgtcaaactatacaggaaagtttaaataatagctatctctcacatgtatcaaaggcatgtagatcccatatttccaacttcagactctctaaggccacatgagccctgcctagtttggtagtgggtcatgttctcttgctgttctctacatgctctgattcacacaatcattcctccctaccttccattgtgttcgctgagctcctagaagacagagggatctgatggagaactccaatctttggatttttatctggctatgtatcttttatactgctcccttctgctggcagaggtagcctctctgatgagactgggaaaggcactagtctatgagcacagcagagtatagttaagaatcaggtttttttgtttttgggttttggaagtcatgttgtgttcaactggaggtctcaggaatatgcattctcaggtccctagacatccaggcaatgccagtcatgggctcactcttttggtgtgtgcctcaagtaaaacaagatacttgttggctacttccacaagttttgtgaccccctcagcattagcacatcttgcaggcagaacagaaaacagattttaggttgaaagttttgtgcttggttttgtattcaggtttctgtgttggtaacctgcagagtaccttactgtaccaaagagactagaatgtacatgtgaaggctccataatttaaaaactatgcacgtgggattgattcctttccactgtcatgtgcttatttgaggaaaggtgcatgtaattaagaaacagcatgctttgggaaggttgacatttttaatgtactaggtctacctaattataaagtaggatcttatcttttcattcctaaatggagtgcagtgaagatctgcttatctacagtcagaaactctaaagcaatgtcagtatcggtagtgtagatactgaaaattccattgtgaacagttgagagatatagcttcaccaaattgattcccaagcatgtaacacaacaggaggtggcacagccatatctagtgggaatagcaaaagacataaagtaagcccagctgcttgataaatttccagcaaatctgagacatgttttagttgcagtcccacatttggttttgatctccagatgtagcatacctgaggtacttaatattttgtacaattatttgggtatatttaattaaaggaaaatttcttatgaataatttatgccttcttctaggagcactgcttctaaacctccccttggaggacttccttatgctttggaggctctgatgcacataaagaagtcagatatttctttatgagactatgggatattctacaaacatctgctcctctacttacttggaaacaagataattaaaacaacttaaacttagaaggtcaacaaaatttggtgaagttgacagcagacaagactacaagtcatttcctaatatgtattcagtggttgcatggaatagacaacaacagttatattagctaaagttacctcagcaccactgtggggttgtatgatcaaggagcaaaaaattgtcagcttagacatataagcaaattctctaaagatataaaagataagcatcatattatggtagaatttgaatattaattgtagcagctttggctactgtaggtcatatttagatttatataaggaaccatgggaaaaataccggaacataaagaatacattgtgaagggtcagcttcattaacaaggccactaaactgtcatagttttattactagaaataaaagtcagggttggaaacatggtttgttggaaaagagttcttgctatgcaaccataaagatgagaattgagagccccaatattcacataacaaggtgagtgtctcacaaacccttaaaaccccagctcttaggtcaaaagagcaggaaactcactgatattaattgatctccaaccttgaccagaaaacttaagcacaaagtccaggacaatattcttcctcagaggactaagcagaacatgtagaacaagtcagctgatgttctgttctattccagcctctgcatatgcagaggtgagtacacttacatacatacacacacatgcacatacacatagatgtaagaatgaataaaaaaataaatcaataattgtattttgtgtggattgatatcagggcaactgtagccttgtaaaaagagtttggcaatgctctttctgtttctattgtgtggagcaattttaggagtatttgtaatagcttttctttgaaattctgttataattctgcagtgaaacatctgaccctgggctatttttggttgggagacttttgatatcttttctcccaccttaggagttacaggtctatttaaattgtttatctgatcttgtttttgttttgttatgtgggacctatacagaaaattgtacatttccttttaatttttcaattttttagactacagatgtttcacgtataacctgatgaaagtctgaatttcctcagcatctattgatatgtcccccatttcatttctgatatttttaatttccatattctctttttggttagttggaataaaggtttatctatcttgttgattttctcaaagaaccaactctttgtttcattgattcattgtaatgatctctttgtttctcaactaagaaagagaattacagaccaaactccctaaaaaaattgatgaaaaaatattcataaatattggcaaacacaatctgagaatacatcagaaaaatcatccaccatgatcaagtaggcttcatcccagagacgcagggatggttcaacatatcaaaatctgtcaatgtaaaataccatataagcaagctgaattaaaattatatgagcatgtcattagatgctgtaaaatctttccacaaaatctaacaccccttcatgataaaggtgttggagaaatcaggtatacaaggaaaatacataaatataataaaggcaatatatagaaagttaattgccagcatcaaattaaatggaaagaaactcaatgatactccccaaaatcaggaacaagacaaggcagtccacttcatttatctcatgtctattcaatatagtacttgaagttctagctagagcaataagaaaacaaaatatcaagggaatacaaactgtaaagtaaaaagtcaaatattcactatttgtagatgatgtgatagtttatgtaaatgaccaaaaaattctaccatggaactcctacagctgataaacacttaaagtaatgtggtaggatacaaaattaactaaaaaaatcagtagccttcctatatacagatgatatatgggctgagaaagaaatcagagaaacatcacctttcacaatagcctcaaacaacataaaatatcttggggtaacactaaccaaaaaagtgaatgacctatatgaaaagaattttagaatttaaagaaaaacattgaagaagatatcagaaaatggtagtatctcccatagtcttgagtaggtagaattaacatagtaaaaatggcaatcttaccaaaagcaatctacagactcaatgcaatccctatcaaaataacagcacaatactttactgtccttgaaagaacagtactcaactttatatggaaaaacataaaacccaggacagctaaaacaaacaaccctgtacaataaaggaaattctggaggcatcacgtcaccattcctgacttctaactctactacagagctatagttatgaaaacagattgatattgacacaaaactcacaggtgaaccaatggaatcaatcaaagactctgatattaattgacagaccaatgaatacatgacttttgataaagaagctaaaagtatacaatggaaaaacgaagcacattcatacaaggacatctgttcaactatgttcatatcagcactatttgtaatagtcagaaactggaagcagcctagatgcccctcaatctaagaattgatagagaaaatgtggtacatttacacaatggagtactactcagtgtaaaaaaaaaaaaacaatggaatcttgaaatttgcaggaaaatgtatggaactagatgaaaccattctgagcaggtaacccagtcacaaaaagacaaacatgatatgtactcactcatatgtggatttcagacttagagtaaagtaggatttcagcctacaatccacactgccagagaagctagtaaacaaggaggaccctaagagagacatacatggtgccctcgggaaggggaaagggtcaagatcccctgagcaaattgggagcacgggaagagggaggagggaactagtagaatcagaaggggagaagaggagggatgcagaggacacgagggagcagaaaggttgagtcaggggaaaaatagaagatatgaagaatggagataccataataaagggagacattttaagtttacagagaaatcaggcactagggaaatgtatggagatctacaaagattacaccagccaacaatctaagaacagaggagaggctaccttaaatgccctcccctgataatgagattgatgactgacttatatgtcaccctcatccagcagctggtgaaagtagaagcagacacacacaacttatcactgaactgaactggaacccagatgcagagaaggacaagtaaagagcaaaggagtccagaccaggctggtgaaatccacagctgacctgaacatcagggaactcttgttccccaaactgatagctgggataccagcttgggactgatccagaccccaggaacatgcatttcagtgagaagacctccgaaatctacaggacctcccgttcagttcttatccctagcataggtgtagactttgggagcgttccacaagaggaatactccctgagccaagacacacaggggtggccctaggccctatcccaaaggatacaatagactctgatgacaccatatggaaggcctcaccatccagggggagcagaaaagatatgtgatagctagggtttttgtgtgtgtgtgtggagggggtggtatgggaggacaggagggagaagggaactgggattgtcatgtaaaacaatcctgtttctaattcaaatataaaaaaatctgaaaaaaaaataaagcagcttcagcaaatgagctgtcctaacaggaagtcaacatgtagaacaatgcaaatagatctttatctatcatcatgaacaaaacttaagttcaaatgggtcaaagacctcaacataaattcagtcacactgaacctcatagaaaagagagtggaaaataaccttgaaggaattgacacagaagacttcatgaatgtaacaccagtaacagacactgagactgacaattaataaatattacctgctaaaactgagaagcttctgtaaggcaaaagccacagtcaaaaagacagaacagaagcctacaaaatggaaaatatcttcagcaacaccacatctgacagaggcctgatctccaaatttataaagaattcaagaaactagacatcagtgtagtgctccaagaactcacccagcatcagcgactccacactggttaaaaagccgtatgaatgcaaggagtgaagaaaggccttttgggtacatcagccactagctcggcatcaaaggattcacactggccagaaaccctatgagttcaaggactgtgggaagaccttcagacaatgtacacaccttacccaacaccagagacttcacacttctgagaagtttaatgaatgtaaagagtgtagtaatgaattcgtcgcctttatgattctggaagttggattttcaccttgttgaactggttccaattatatatcttttctatattcaccttcatttgcatacaggatctggaatgttttaggaatttcttcagtttcagctctgtacacatctccttgggttactggtcagacatgaaacaatttatctatgtccaacaccatcgacagactcgattgttccttatcttgttcatcactatagaacaagattttttttttgctgcttaccacaacgtagtgtttcttccagccatatcttttgatatttcctctaaataccggaagccagccttcaactcttgactctggaaggtttcaatcagtctcatcagtactaggaaaactaccaatgctgattgaatccaaaaggtccaaaagttttgctcctaattgctcaatatcactctctttgatagccaattgcatttgaagttcatttctgtgtgtacatttttctaccaattgtgcttgcatgtcgttcagctccttctggtgtttcaccatcatttggttaaatttctcacgttcttggtttagttccagttgtagcttcctattttcctttttttttttcttaaatcttgcatattaactttcttcctatcaattttaaaatctttgcgattcattatttctgccaatttgttaacagcctgtattttaagggagcatcccacatgaatccaacgcagcagtaggtcacgtggttaactagtttttcaagatgtatttttgaccactttccggagcgacttttttgcagtggatcttgtcgaacatcgttcgaggagaggctctgacaaagccaaaaacacagtttccttactgagtatcagaaagttcagaaaggagaaaagttctatgaatgtaaagagtataggaagacctttgtctgctgctcaacacttagtcaacacgcgagaatccacactgatgagaaaccctatgaatgtgtagactgttggaagaccttcagtagttactcccagctgatttcccatcagagtatttgtgctggtgagagaacctttgaatgcaaagaatgcaggaaagcctttccgactgctctcccagctcactcagaaccagagcatccactagggggagaagccttatgaatgcaaggactgtaggaaggcatttagagtttatccatttctttctcaacacaaaaagattcacactggataataagcctatgtatgttagaaaaatggttaaggcttcacatcagaataccaaataatccaatttataagttgggtacagatctaaacagagaattctcaacagaagaatctcaaatgactgaagcaattgttcaaaaatccttagccatcaggaaaatgcaagtcaaaaaactctgagattccatcttacaccgtcagaaacactaatgaaagatttatactggaaaggatgtagagtaacatgaatactcctcaattgctgataggagtaaaaacatacacagatgctttagaattcagtatggtggtttctcagaaaattggcaataaatatatctcaagacctaagaatactactcttggacatatacccaaaggatgcacactcatgactcaaggacatttgctcagctatgttcatggctgccttacttgtattagtcagaagctggaaacaacctagatgtgcctcaactgaagaatggataaagaaagtatggtacatttacacaatgatatactattaagaggtcaaaaaaccaatgacatcttgaaatttttaggcaaatggatggaactagaaaaaataatcctgagtgaggtaccccagactcagaaagacaaacacagtatgcagtcagtcataagtggatattagaaataaagcaaagcataactatcctatagtccacaaccccagagaagcaaggaaacaaagaggacccaaagagacatacatggacgtgtggtgggagaggggtggtggtcatggagtgggaaggggagaaaggaaagggggaggagaatatgagggatcaggaagatcaaattgggggaaggacagagaggaagagcaaggaaagagataacatttaagaggaagccattatggggttagagagaatcctggtactagggaaattcctagaaatccacaatgatgattccagctaagaatttaagcagtagtggagagggtgccttaactgcccttcctctgtaaccagattgatgactaccttaattgttatcctagaactttcatccagtaactgatggaagcatgtgcagagacccacagctaatcacagagctgaactcctggagttcagtcataaagagggaagaatgataatatgtgcaaaagggagaagactactatggataagcccacagaaacagatgaccctagccagtgggagcttattgactccagcctgacagtccaggaatctgcataagacaaaactaggccctctgagtgtgggtgacagttgggtggcttgggtagtttatggagccactagcagtgaaaccaggatttatccctagtgcatgaactggctttttggactgcattctctatggagggacactttgctcagcctagatacagcacagcgggcctttgtcttgcctcaagtgttatgacagatttgttgagtccccaggggaagcctcaccctgtctgaggagcaggtagggtggggtggggagaaggaggggcatcaggaggaagggagggagagggaactgggattggtatgtaaaataaaattgtttaaaaaataaacaattttaaaaggtgaaaataaataagtaaataaagcaataaatgaataagtccctgaaaaaaatgacacctaagagtcaagatacagatcaattgtacaatagagtaactacccaagctgggaattatggtacaagttgtaatcccatattcaagattcaaagccaggaggattaggagtacaatattatcctcatttttataatttctagatcaggcaggagtaatatataaataaaatctaagagttgttttgatttgtatttccctgatggctaaggatgtggagcactttcttaagtgcctttaggctgttttagattcctatatagaaattctctatttcaagctgtaccctgttttttaattggattacttggtgttttggtgactagcttcttgagttctttgtatattttggagatcagctatctgtcagatgtgacgttggtgaaaatcttttccattctgtggtctgccattttgtcttgttggctgtgttctttgccttacagaagcttctaagtttcaggaggtcacatttattaattgtctttctcagaatttgtgctactggtattatgttcaggaagtgatttcctctgacaattaattcaagggtactaccacttgctttactaagatgttcagtgtggttagatttatgttgtgatctttggtccatttggacttaagttttgtgcattacagtagatattgatctatatgaaatcttctacatgtcagcatccacttataccagcaccatttgttgtagatgctgtctttttaacatcatataattttagcttcttcatcaaaaatcagatgttagtaggtatgtggattaatatcagggtctttaatttgattccattgggctacctgtctgtttttgtgccattatcaagctgttttcattactatagctctaatggtgatgtctccagaagttcctttattttttacagggatattttgcctatcctgggttttttgcttttccatatagagtattgttctttcacggtatctgaagagttgtgctggcattttgaggtgaattgcactgaatctgtagattggaattttttcatgctgtacctattatattcaacacagaagtagattttgtctcacatttttaaaatttaaattagaaacaatcttgttttacataaaaatgtgagtttcctctcccttccatcctcctatccccccacacccatcccatccactttctgctcccagggaggagtgaggccttacatgggggatcatcaaattcggtcacatcatttagagctgagcataggccctcccctttgtgactagactgagagagtatccctctatatggaatgggctcccaaagtccatttgtatactagggataaatactgatccactgccaaaggccacaaaaaatgcacaaccctcctaactgatacccacattcagggggcctgggagcaggaccctaaaagagacatacatggtcccctggagaaggggaaagggacaacatctcctgagcaaattgagagcagggggtgctaggggaaagggaactagtagaataagaaggggaggagaggaagggtgatgaagacatcatgggacaaggaggttgagttgagggaagaacagaagagagcaagataagagatattaaaatagagggagacattataggtttaaagagaaatgtctggagagttacaaagatgaccccaactaacaatctaagcaacagacaagaggctaccttaaatgtcctctcctgataatgagattgatgactaattcatatgacattgtatagcctttatccaacagctagtggaagtagaagcagacacccacagctaaaccttgaacagaactggagtccagttgcagagaaggaggtctgatgagcaaaggagtccacaccaggctggtgaaacccacagaaacagctgacctgatcaaggagagctcttggtccccagactaatagttggcaaagcagcatgggattgaaccagaccccctgaatgtgggtgtcagtgaggagaccttggaaatctatggaacctcttgtagtggatcagtatttatccctagcatttgaatggactttgggagcccatcccacatggagagatactccctgagcctagacacaagggggttggcatagaccctaccacaaagactatgacagactttgaagaccccctatggaaggcctcacccccccccttgggagcagaaagggtatgggataagtagggtgttagttggggggggggaatcatgagaggaggtgagggaaagggacctgggattgacatgtaaaataattttctttctaattaaatttaaaaagacaggaactagagaggagggttccaaaacaaactttcatgctaaaatttccaggacagagggtttctgtttgcacccacaagggttaggtcttgcttctctaacctagctgtccatcgatgcttggccagtggaagctcattcctgtttccttacaagcagaggaaaatgaagtcaccatgaaacatctaagatgaaggaaacccatacattaaataatcaattgctgactgtcacttcatatcaaacacagaaaaaaatgtttattttggaaaatatttatccatcaaaaatgtaagtaatccctttttatagaaggagaatctctgcctcctcagaggaatgcatgtaaacagacatcagtctttattcaaattgcagcatgtatgtcaggttcccaagaaagccactatcatcggtgaacaggaaatcattaaaaaaacaacaacacagtttattacttttcttttcttatacaattaaatccagaggaaaacattccaagtcaatttctgtctgttctctttgattttattattttcttgattttttttagtttttggagactacgtaattacaatatttctaacttattttattctaaattttaaaagtattcaataaattcaagataatgaatataggtatgagtggggtacacattaaaattaaaacaaaatgtgaattttagtaaagtaaataataaaatgttcatattcagttgattgatttaactatcagacacccttgcaagtccctcgctacaagcagaatccattagcgccaatgaaaaatgggtttacggaagatggagttcctcagcgcatctttgacatccttgttcctaagggtgtaaatcagagggttgagtaatggagtcacaaacgtgtagacgagggcgatttggcggtcttcatcatctgaggtgctggagcggggcctcaagtaaaccaggctacagccaccatactgtagcaagacaacagtgaggtgggaggaacaggtggaaaaggcccgctggcggccttctgcagaccgcatgcgcaggattgtggatacaatgaatacataggaaatgaagataagtaagaatgggactgtcagaaccaggatgctcacaacatagaggacagcctggtgcacatggatgtcagcacaggccaggcgcagcactgggggcacatcgcagaggaagtggttgatttccctgtgatgtccacaaaagggcaaggtgaaaattaaggaagtgagctgcagggaaaggaatagagccaagttcaaggatcccagtaccatctggaggcacagcttccgggtcatgatgaggctgtagtgcagagggtggcagattgccacatacctgtcataggccatgattgccaagaaaaagcaatcagtgccacctagagtgaggaaaaagaacatttgtgttccacaaccagcaagtgatataggcgtctggcttcccaagatattggaaagcattaacggcaccacatctgtggtgtagcagatttctaggaaagacaaactgcccaggaagaaatacatgggtgtgtgcagggagctgtgtgtgcacaccacccaaatgatagcagtgttgccacagaggatcatcagatagagcaggaggaagagtgtgaagaggagagcctgcaactcagggacgttggtgaaaacacggaacacaaactcagtggcttcggattggttaagttcatgtttcacagctagcatggctcctgcaaaaagaaggaatcaatttgtagaaataattctgactgttttattagaaatattcatgaattatggaaaatcttatctacggacaaatctccaagaccacagcctatgggtgctcctggttgaatacctttgattttttcaatttagcagtttacctaaatgtacaagtgctaacattttgtgtgtatgtaaaagacaatatattaaaaagtatgttggtgtatttaaaattaggttaagagactccatcttcattattttggtattcatatattcttaacaaaataagtcatagacagtaagaatatatgccagttacattttatagtaaatttaatcactcactgacaagatgaatattacaaattatatgtaagtgcctttcagtattatctatctcagctgtcagcactcttttttattattggtgtttatgtttcaatttctgtatataatgataatgcatgtacactgttgtacttggctttcacataatatctaaaaagttttctcttctgtgtgctaatatgttcctttcatagctttatcattcactactttatgactacactctaattatcatgatttgttgattttaaatccagtattttgtactctgtcagaaaataggcaacaatacctaacgccatcttttataatacatacttttcatgtacttcccttcataaacatttttcctaaatttcccattgttaaccaaagctttgttccctgacaaaaatttgcacgatgaatggtctttaggagctcattccttatggagggatactctctcagcctagatacacaggagagggcataggtcctgcttggtattggtataaaaatggataggttgaccaatggaattgaatattaacccacgcacccatgaaaacctgatttttgacaaagaagctaaagttatacaatggaaaaaataaagcatcttcaacaaatggtgttgtcataacttgattcagacatgtagaagatttcagatagatcatatctattgccaagcacaaaatttaaaccccaatggatcaaagacctcaacataaattcagccacagtgaaactcctagagagaaagtaggtagtaccctcaaacaaattggtacaaacgacctctttctgaacatgaaaccagtagcataaacattgagatagataataactggaacctcctgaaactgagaagcttttgtaaggcaaagggcatagtcaacaagtcaaaataccagcccaaataatgggaaaagatatttaccaaccccacatctgacagagggctgatcaccaaaatatagaatgaactcaagaagctagccaccaaaacaccaaacaatgcaattaaaaagtggagtgcagaactaaatagaaaattcccaacagaggaatctaaaatggctgaaagacacttgagaaagtgctcaaaatgcttagccatcagggaaatgcagctcaaaaccactctgagataccatcttactcctgtcagaatgattaaaataaaaaacagcaatgacagtttatgctggagaggatgtggagaaaggggatcactcctccactgctggtgggagtgccaacttgtacagccactttggaaatcagtatggtggcttctcaggaaaatgggaatcagtctacctcaagatccagcagttactctcttgggcatataccaaaagaatgcacattcatacaataaggacatatgtacaactatgttcataccagcattatttgtaatagccagaacctggaagcaacctagatgcccctcaactgaagaatggatagagaaaatgtggtccatttacacaatggagcactactcagcagaaaaaaaaatggaatcttgaaattcacaggcaaatggatggaagtagaagaaacaatcctgagtgaggtaacccagccacaaaaagataaacgtggtatatactcactcatatatgatttttagacatagagcaaaggaataccaatctacaatccacactaccagaggagctaggaaataaggaggatccgaagagaagatttcgtggtctctccaggaaggggagggggacaaaaacccctgaacaaagtgggagcatggggcatgggtggagaggaaggaggtgggaagggaaaaggactgagagatagaggaatagaagagggcaagaaaggagttgcctttatagggagacagtacaagtattgagagaagtctggcagaggggaaatgttaggggatccacagggatgaccccaactaagaatccaagtaatggtaaaaaaaaaatgccattgatgctcttcccctataatgagatttgtgtcttccttggttaccattcctagagccttcatccagtagctcttcaaagcagaaacaggtgctcacagagtaagcactgaaccctaacctggaatccaattgtggacagagaggagggatgagcaaagtagcaaagaaagtcctgcagaaaacctgcagaaatagttgacctgacctagtgagagcatggaaaccctagttataatgctggggaaacagcattggaccgaaccaagccctctgaatgtgggtgccagcttggaggccaagacagtctgtgggacctctaacagtggagccagtctttaactctaaagcataaatggactttgggagacgattgcctattgggggatactatagcagcccagatatagcaagaagtgcctaggccctccaccaaacagtatgacagactttgaaggtccctggtggagggcttcactatccctggggaagagttggtggattggttgggggtttggtggggaacatgggaggatgaaagggtgagggaatgggggttgggtatataaatatgagtagtaattaaagaatttaaataaaaatgtaacagttaaaagaagtaggagccctactatatacagttgataaatgggctgagaaagaaatcagagaaatataaaaatttataatttccacaaacaatataaaataccttggagtaatactaaccaagcaagtgaaagacctgtatagcaagaactttcattctttaaacaaaaaaattaaagaagataccagaaaatgaaaataactcccatgctcttgtacaggtaggaacaacatagtaaaaatggcaatcttgccaaaagcaatatacaaattcaatgcaatccccatcaaaataccaacacaattcttcatggaccttgaaagaacaataaacaactttatatggaaaaataaaagacccagaatagccaaaacaacactgtacaataaagaaacttccaaagacatcaccatccctgacttcaagctctattattgagttattgtcctgaaaacagcttggtattgacacaaaaattgacaggtagaacaatggaatccaactgataaccctgatatggaacaacacacctttgaactcctgattttttaaaaagaagctaaagtatacaatggaaaaagaaagcatcctcaaaaatgatgctggcataactggatgctggagtgcagaagactgcagatagatccttatctatttccatgcacaaaacatgggtccaaatgggtcaaagaactcaacattaatccagccacactgaacctcttagaaaggaacttaggtcataccctcaaaggcattggtacaggagactgcttcctgaacataacaccaatagcagagacactgagagggacaattaatacatggtacctactgaacctgagaagcttctgtaaggcaaaagacacaattaacaaacaaaccagtatcccaaagatttggaaatgatattaaccaacccaatatctgacagagggctgatttccaaaaatctacaaaaaactcaagaagctagtcaacaaaacaccaaataatccaaattaaaaagtagggaacagaactaaatagagagttctcaatagaggaatataaaatggctcaaagaaacataagagagtactcaacatccttagctatcagggaaatgaaaatcaaaacaactctgagataccatcttacttctgtcatggctagaatcaaaaacaccaataagaatttatgcgggaaaggatgtggagaaacgggaacactcctctgcttctggtgggagtgcaaacttgtacagtcattttcgaaatcagtatggcagttcctcagggaaatgggaaacattctaccacaagatgcagcaattccactctgagacacatacccaaaaggttcacattcatacaacagtgctgtctgttcaaccatgttcatagcagcattatttgtaatagccagaatctggaagcaaccaagatgtccctcatctgaagaatggatagagataatgtggtacatttacatgatggaatactactcagcagaaaaaaatagtggaatcttgatgttcacaggcaaatggatggaactagaagaaaccttcctgagtgaggtgatccagtcacaaaaagacatacatggtatatactcactcatatatggcttttagacataaagtaaaggattaccaggctacagtccacaccaacagagaatctaggagacaaggaaggccctaagagagacatacatggtcccccagagaagggggaagggacaagattgcctgagctaattgggggcatgggagagggttttaggagaaacagaaggggagagcaggagaggagaggaagtcatgagagagcaggaagatagtcaggggaagaatacaggagagcaagaaaagagatgtcataatacagggagccaatataggtttaaagagaaatctggcactagggaaatgttccgagatctacaatgaaggcaccaactaacaatctaagcaatagtcaagaatataccttaaatgcctttctctgataatgagattgatgaataccttatatgccatcctagagccttcatgcagtagctgaagtaagaagaaaaagatacccacaggtaaacattgagctgaactctagaatctagttgcaaagagggaagaatgatgaacaaaggcattcaccagaccaggctggtgaaacccacagaacagctgactgaataagtgggtactcatagatcccagactgatagctgggaaaccagcatagaactgatccagacccccgactatgaatatcattttggagttctggttaatctatgtgagctctagtagtggttaactatttatccctagtacacaaatggactttgggagcccactcctcatagatggatactctttgagcctagacacacggggaaggtctaggccctggtccaaattatatgacagacttagatttgaagatcccacatgaaggcctcaccctcccctccctggggagcagaaagaggatggaatagggggatggtgggggtcagtggaggaggggggtgagagggtattgggattgatatgtaaaacaagcttttttctaatttaaataaaaaagaacagtaaaaatattattttgtataattttatattcatatttgataagactatggtttcaccctccataacaaagtaataatgatgcattttaaaaaggatcttgttttagatggcttttattgtcaagctaaaatctttgacacttcatccaagggtttatgagtgatgcccatttgtgtgatttaagtgaagatcatatatctaagaatactttgaataaaaagttatgttttaaataagaattacagtctataaactgttccttccaatcaaaaataaaagaacagttgaatagattttagcaaatgacttgtcagtgaatacactgagcgagtgtacatgtattgacatatcttcccatacccaaaaggcaaggaccattataatctgttaattaaaagaacaaaacttatttatattacatttgaaggtaaatacttttgtgtttggatatcaatgatttggtaaaaatttcaatgttttaatattaagctactaagaagtaatgacttctacatttttgcatatgaggaaattaggcatttgcccaagattacaatgttacatactgaagtactatttaaacataggtacactgctgctaagtctccagtcttaatcacctatttaattgatctccattaccatttttttcagtttcattgtttgtgggatggaaatgggagtcaccctatttgggtttctgagagacatgttggaagtactagaacattgctggctgtgtacccagtaaatgtatatctgttatcattcattactgttttaacacagctacaaagcctcagcatcataacagggtgaaaggaataatcatttttgtaggtatttttcaaatcatatgcatgaaatttcatcttcatttggaggatttaagtaatttgaaatgtcaagaaaagctaaaagctagtatacaatattttcatatttcaaggtgatatatatatatatatatatatatatatatatatatatatatatatatctttctttttctttatttttctttcacatcatacatctccatcccactcatttatctttccctttacatcttccctatacccttgcaacatcgcacccaaaatgatataaaatgcaatttaagagaaaaaagagaagcaaaaaagaaaaagcaaaatcaaaaaagaggaaaaaccaatctgttcatgaatgttgtatcatgacacagtgaaccctgcagtatatccttctatatttgcttgcaagggttccttgcaacaagtcatttgtctggtatgaggcctccagtttctgctacctcactggaattcctcttggttatcctgttgttaccctgtatcagggagatcaggctgctttgaggctgcaggaccagtccctccacattctctagaagatcacagatgggataggcagaactaatagacttcagcaaaataaataatgcaaaatttctttgagtgcaggacatattaaacaaatttaataacaagtgagagtttataattcagcaaaagtatatcccactgcaaaaactgaaatctttttagaaatttaaaggcaagcaaataaataaaatccaatttcattagtattcaaataaatacacaaacaaaatggtaataaaacgttttgagtacaaactttctataatgtatgaatggtaactccttctggtatttatgttagagagtcaggtatattcccaaatttccaaatcatgtgtaatttctatgattattatttttaataacaattaatttctattttgcaatgaaaagcatgaataaacaataccctttgaccaggtatattgcttttagaaatatgttttgatgaactaactgtataaaatatgcatggatatttgtcatattttctaatagaatggaccaaaattatagtaaacaaagatcaacaagagaagatgcttattaaagtttacttgtctatggtataagtctctgaagtgatttgaagtgacaccatgaaaaatctcacaagatcaaacaagttcattgaaatcagaatgtaaaatagaacaccacatagaaataataacatagattcacaaaaatgaaagagcatacctggaaatattaggtattggcattgtatggatggtagagttgttattatttctgtttgtggttacattggcttctgcttggcatttcagaaagtgttatgggacaggatggtaaagtgctgattaattgaattttataatcatatctgagtttgaaattcatgcttctgtttgctaaattaatttttacactgatcatattgaatgacattacttcactctctaatgtgtaacagtggatttgaacttggtttctgtaataattataaaatgacaaatgttctaaatgtataacattactggtgttagcaagatttttcccctttgatacttactctctcatctcatattttttaattagagtgtgagattcttcagagctgcatcttctagggctttgtgttgctctgctaaaccttcgaaagaaaatgaaaaaaaatataaaaacaaatagagaatggattatagcaggagaattccaagcacatacccaaatcaaataaggtagaagtttgttcagagaaaggcccaaagatagttctgtcttatccacacatgaaaacgaaggaagaaacattgcacacatgggaagacagtgaaatgacacaaaatgccattcttatggatgaaaccagccatggtattgggggtctgatgtctgccataatgtcacctgatagactagggcagtgcttctcaaccttcctaatactgtgacactttaatacacatcctcttgtcactgttgactctcaacaataaaattatttcattgctagtgcataactgtaattttgctactcttatgaatcatatgtgagtgactgttagcacaatatctgatattcaacctgtgagtacatgtggtagctgaaccacagggtgagatccactggactatggggaaagaaaagaacacatactctcaagatcagcctgtaacccaaaattatcatgtaaatcagaatttatatttgaaatatatttaattattttatagtgatctttatcaatgtaagtatcaaaatattttaaaacatctttacactgtgtgtatattcctgggtgttacattaaaataatttcctcattactatatagcccctgaaaatcaaaagtttgcattttttatcttctgtattctaaggctttcccaagaaagttttcaaagaccactctagtaaaaaatactgttgattgtgaatgtctatattgcctgcttggggtcctgatgaattcctgtcaaagaaaagttgataaatatttttgttacagctatattaatttctacaaggcagcaggatatctacttcatttactttatattagtggatcagtaattatctttgtttttttcacatcttataaaggtttcaactaccatattctggcactatttctacaatatagttattttataaatagtttataacacaatgactgtaccttttctctgtccaatgatcatgtgtttataattgtttgatacagaaaataacttaaactctgattgacatgaatcaaattgatcaaaggacagaagaaagcataaaaattaaactttaggtgtactttttattctaggaattttggttatgatggaatactcagctgtttagaaactatccttcagttcttgatgagcatcacaataaatccattatatatgtttaatttgcaaatactctacaccttaaactacaaacctttccctgatgcttatgtaaccctcaactctgttgacaggcatgcaatttgtacactgcctaataagcttatcattcccttaactatcagtgtattgcagctcacaagaaaataaaagaaccaggtaaatattagttgagtataaactattaaataaagtcttaggcataattgagataataaaaaatgaatgatagcttcaacttcataagagaacacagcatgtaagatatgaatttaaatgttcagaagaactgatcctaaactattgtcctcatgaaataaatttttgtccttctttaggaatggaaatgataaatgtcagcttagaaaatattcaattttaagaagatttaatgtacattttattataaaaaaacttttaagtcttgatgtaaagtaaacactgtgattttacataaaatttcaatatgagatatgaaattttcacaaagaaagttggactgcttacttttggacatgcagaaaacttagaagactcaaattttatcctggccctatcagatatggtacactatacagttaaaccacagcttcctttttatgtctgtcattgcaaatcataatatataatagaataactcacttgtagtctgtacactaatattgatattcatgattattcatttcaatttaaagcattatagaaatttttcttatggaaagaaaataaacatcaaggaaatgaagttgtttagatactcgctcacaaatttcaaccttatttcattaaattaggactgaaatataaggaaactcaccaaaaaacaaattaactttgctgctgagatgttgctgccacagatgattgagggagttccctctgagagttttttcaatcttgtcataacagaagagataatgaaggttcatgaggtttttggttagccacatacagaggggaaaagaagatagtaaatgttgctttcataatgtctacctgacagtaggaagtgttctttatattctgacactcaggagtgagtccctttaaaattagtgtcttggatagaactgaacaaaatagatgtctatcaaaaccataatatcatggaataacctaattttaagttatgaattaaaagacctatatcttcctctggaatagaaagtagattctgatacaattactaaatccagtcttgcctcatctagtcatattttttaatgtccttcatgggatctcttgaaaactaatgagtctctcaaggtgagataaatccctagtggtacctcttaaattcagagcaattggagaaagacaaaagttgaatgattttttttctgtgtggccacaataaaaattgatgccttgggattccaggcaggtatctttaacttctatcttaaacccaatagagactgttaccttccagataggatgcctcatgagggctcatgacagcagataatccagccagctttgactcttggacttttgtacactcacttaaacctggcatggtatctgaagatctgctgtgtagttgtggctctgatatctgatgattgttcttgttatgatcatgatgaatttcttaagtgggctttcttatctatgtttgaagttgttggtttacatggacttcataagtctgttagattgataatccactgaattttaatgctttcttgaaaagcacagtttatggagaattgttccatggaccttctttctaatacttggtgattttttccttattttaccttcttttatttttcatgaagtttccctcagttattttctggctattttctctcactccccatatgtgtcagtttctgtcccttgatggcttcaacgaagaaattgcatggtctattttatcaatgtctacctccttcctttgatagcaaaccagcttatgtttatgatctgcaaatgcagtaattctctagtctttatgtacctcccaaagcatttgggttatacacatatactgtgctcagtttatcatgggggttttagagttttgtagacagttactcatgcttgtaaagcaagggctcttacccacctagtgatctcccctgactgataactgaattgttactctttgaagctctcattttctttttaatttttttaaattgatatctattccccaactcttagcttaggtataattttcttatatgttactttattttcttctttctactttcatatttaaatgcatgtgcttcacttactaccaatgttatgaatttttatacatgtttagttagcctgtctcatatacaaaataaataactcatttttgttagtatattgcaagaatttcttgaatcacatggtgggcaattttggttttcaatggctagatgtactagcgttgtcagatttttgcataatgattatatttcttggaagaggaatgaagataaataataaaaataggagaattaatttcatttcagaaaatgagaacataaattgtaactggcaagattccaaggatgaaggaaatcagaatgagttgataatatcataggtaacagggactactttaggtaagatgcttagaaaggcttatgaagcaatagtctatgatctgagtaattttctacccagaggaaaggtagatataaactgttttaaaataaaaacaaaagaggcaaaagctccttcatgaaactaatgccagcatttgaaataactacctccccaactaatatgtgtagtatgtgtctattgcttaatgttgctattgctggttgtacgttttgctttgtgtatgtgtatgtttacctttccttttccaggaataatcttgacatttgttgtcactgtatacagtttttgcatcaggcttaaaaccttctttagactaaaaggggaattgtagtggcattaagttttgccatattgaaaacatctaggagacaaggagaggacaaactccagatggaatgtggttggtgccagtcatactttccagaatagcttggtgctgagtcaggaagcttcccttaagagacctgtgagcctctgttagtttctagaaaacagagccaacctgagaaaatgctgctgccaaaagactgtgcttggctttgtccttttgttcctaaaatccctttttaagtttttgtcaggttctacatggaaatccatgcccactttactgccaccattttgtaactgtagtttttttttgtcccaccaggtcctgctgcttcagcaccaaatgaaaacacaggtttcctatattaattattaaactgttggctggggtctagggcttcttatcgtctatctctgtcttaataattaacctttaactaatgatctatgtatttctacatggcctcatcttaccagagaattcctggtacgtgctatcctcctggtccctccatggcatctctggtgcttctttgactaccctttccagaattctcctggtctcctagccccatggatcttcttgcctctatcagccaaacagtgttttattcatcaaccattgagagaaacatatatatacagaaggacatcccccatcaaaaaatgtctttcaaatacatgcaagcaaaaaatatttttttatttctgtgctaatagttattccaaaattgatagtggaactcagagcatgtacaactgaaggatattttattgaatattatatcaaacttgttatttaatttaggttctttgataatctctctgtttcttgagttctctagaattagtcatggcacattcaaaatgtgtaactaagaatatttcatagaaaattacaaagatgaattggtctcagcagaggagcctgaaatatgtttgggtcagtgtttacagcttagggatagctgccatttttgttgccatttttaactgatgaatcaaaggctcatacatttgctcatttaaaaacatgttaagatttcattgttttttcccactgagtagtactccattgtgtaaatgtaccacaatttctttatccattctttggttgaggggcatctaggttgcttccaggctctggctattacaaataatgctgctatgaacatagttggacatatgtccttgtggtatgaatgtgcatcctttgggtatatgcctaagagtggaattgtgttttaaaagagaaagaaatcgagtatctgaatggtggtggcacatgcctttaatcccagaactcaggaggcagtggcaagcaaatctctatgatttcaaggccagccatgtgtacagagtgagttctaatgtagccaaaattatatagagaaacactgtctcaaatacacagacagtctggatactgtatgttattgtgatgtctttgaattgtttgattgctgagaaaggagcagcagctgctaacagacatttgattataaatgctgctggattaatccaatatatatatatttaaaatgtcttgacttcaaaatttaagtgtagcaaatttcaagattccatatatttttctgctgagtagtgctccattgtgtaaatgtaacacattttctctgtccattcttcagttgaggggcatctaggctgcttccagtttctggctattacaaatagccctgctatgaacatcgttgaacatatgtccttgttgtaagaatgtgcttcttttgggtatatgcctaagagtggaattgctggatcttgtggtagactgattcccattttcttgagaagtctccatactgatttccaaagtggctgtacaagttgtgactcccaccagcagtggagaagtgttcccctttctccacatcctctccagcatgaacggtcattggtgttttttatttttgccattctgacaggagtaagatggtatctcagagttgttttgatttgcatttccctgatggctaaggatattgaacactttcttatgtgtctttcagcctttttaaattcctctattgagaactgtctatttagttttggtctccactttttaattgggttgtttggtgttttggagactagcttcttgagttctttgtatattttggagatcagccttctgtcagatgtgtggttggtgaatatcttttcccagtctgtgggctgctgttttgtaatcctgactgtgtcctttgccttacagaaacttctctgattcaggaggtcccatttatcaattgtttatctcagtgtctatgcaactggtgtaatgatcagaaagcaatctcctgttccaattaattcaagtgtatttcccatttggtcttctaataggtttagtgtggctggatttatgttgaggtctttgatccattttgagttaagttttgtgcaaggcaataggcttgtgtctatctgcagtcttttacatgtccgcaaccagttttgccagcaccatttattgaagatgctctcttttttccatcgtataaatttggattgtttgtcaaaaatcacgtgttcataggtgtgaagtttaaactcagggttttcaactctattccattgggctacctgtctatttttgtgccagtaccaagctgttttcagtactatagctctgtaatagagcttaaagtcagggaagtctaagaacatgctactttgaaagagatttttgttcttgtttccacagaatatgaaaagctttggattccttctagactaacatggttggatcaagtatgatcccctaatccagtggcccaggtgattcaacatccaagacagttggcacaagcagattgttcaccaattaatagacaaggagactgatattagtagatactatgaagttataaaggaaataaattattaaaatgcatattcaggactagaaccagacagtggcacctatgtaaatgcataacatcatcttttttgctgcattttgctctgtccattattatgtccccctttttatttctgattacgttaatttgcatgttctttctctgccttttgattagtttggataaaggtttatctatcttgtttattttctcgaataccaactcttagttacattgatgctttgtgttattttctgtgtttctactttattgatttaagtcctctagttggttattttctggcatctaatcctcctaagtgaatttgcttctttttgttctagaattttcagttgtgccattaattctctagtgtgatttttctccagtttcttgatgtgggcactttcttcttagcactcctttcaaagtgctccataaattcatgtatgttgtgtcttcattttcgttgaattctatgaagtctttgttttctttgtgtatttcttccaggacccaggaatggtaaaattgtgcattgtgcaatttctgtgagtttctagggtttctgcaatttgggtagttgttgaattctaaatttaaaccatggtaatcggataagatacagggggttatttcaaattttgtacctgttgaggtttgctatgttgccatgtgtatggtcaattcttcttttagttcatttgtttctttgttaagtttctgtggtcctatctagtgatgagagtggggtgttgaagtccttcactataactttgagaggttttatgtgtgatttgagttttagtaatatttctttttatgaatgtgtgagtttttgtttttggtgcatagatgtccagatctgagacttcatcttgatggacttttcctgtgttgaataggaaatgatcttcttcatctctttttattgactttagtttgaagtctggtttgttagatattaggatagctacaccagcttgtttcttgtgtccattttattggaaatctttccccaaccctttactctgaggtaacttatgtctttgaagttgaggtatgtttcttgtatgcagcagaaggatggattttgtctgtgtatccattctgttaatctgtttctttttagaggcaagtaaagaccattgataatgagggaaattaatgaccattgattgttaattcttggacgttttttggatttgttgttagtggttgtattgtatgtggatataccctcttgttctttggcttttggtaaagtgggattatttattgcttatgtttctgtgggtgaagttatcttagctgggttggagttttccttccagtactttctataggactgggttagtggatatgcattttttaaattggtattttacgtggaatatcatcttttatccatgtatagtggttgaaatctttcctgggtataatagtctaggctggcttctgtggtctcttattgtttgtagaactttggactttgtggctttctgagtttccatggaaaagtcggtcgtaattctgataggtctgcctttatatgttacatggcctttttcctttgatgctctgaatattcttccattctgcatgttttgtgttttgattattatgtggtcaggagacttttttgtgatctactctctttggtgtactataagcttcttgtatgttcattggcatgtctttctttatgttgtgatgttttcttctatgattttgttgaatatttttttctgcacttaccaggtgggtttcttcaccttctattatacctattacttttaggtttggctttttaagggtgtcccatatttcctggatattttgtgttagggatttgttgaatataagattttctctggttaatgaacctatttctcctgtttcttcagcgcctgagattcactcttccatctcttctattttgttgattatgcttgcatctgtagttcctgatcatttttcctgcttttctatttccagcattccctcagcctgtttttttttaattgtctctatttatgctttccagcctttaactgtttgaattgtttccttcgcttgtctggttgttggctttccttgctttctaaagatatttgtttatttcttgcattttttggtttgtcttttcctcgatttcttgaatttttgttttttcttcaatttcttcaagggattttctcatttcatctttgaggatttctatcatcttcacaaagttgttttaaaggttgttctcttctgcttccagttcagagtctctagacccttgtggcatcctattagtttttcttttgttgaatgtgttcttgtattgtcatcttcccattccttgttccagtgagtgcaggtggggtctcttcctctcctgttgcatacttgtccaaggttctcttctgttgggttcaatcagatccaatactccaatggctctcctgatgggtgcaggtaagttgcactgtgatgttggcagactctggatggtttggttccgaggcgcaagtccacctgcccacattcaccaggccaggagacatcaaggagagcaagtggaagtcagacctgaaagtggcccacactcacctctccccttggatctgaaattaaatatgtaaacgaactctctttgtatattgaaggttagtaactatattaggagattttgggaaatcttataatgccataggaatggctctgatatttgaattgagttataaaggctttgatccagtttatttgttttttctgatttatacccaagcattcctgatttatttgaatccatgtagaatgtaggagctccagaatttggcattcctattgttttatgagggagaatccaattagttctttttataagctgaattctcttgctttaggggtatttgttgctaatgactcccaagaaaatactgaaatctcttggccagtattcattattgctgcccacaatgagacaatttcagcctttgctgccatgattcatgctgggtctagtcctgctaattgtgcaagtcacatttttgttgtcagaataaattcagaaacttttgtacatagactttaactactctttgtgtgataaaaatatccattctaagacattatcttcctttgtataaaattgctgtggtaaaatgagtagaagaaaaaaataactaaaatacaacagaatttgaaactaaacaattctacctgttcatcctgttattttttttctagcagagccaattctctctcagcctcagctgataattttcttagaatatttaagcccttactatcttgcaaggtttgaaattcattacatagctcttgagtacttactctaattatgagacatagccacctagtaactcctagcaatttttgaaataattaagagtttgtaattaatctctactagtttgtacattctgtggttgagttttctttaaacccatcttatatctcaaataattgatagaatctcctctttgtattttttcaggagtaatttataataaattcagttgcctatgacatattttccattgtcatttggaaattaagaaagttacctagcaggaaaagagaaaattgaatattgtgctagctgaacattaacataagtgaagcatgtgtaaattttcttgttcatgtgtcaaaatcttgtctattgtaaagtaagatcaattgaattcagagtataagaaatctgactatgaaataaatgtattttggaatttccttgctgattacaaccggaaaacacagtgcaagttaagattcgggctcatttcaacttggttgttagacaatattgtttattacagtaatccatttaggattattttatactacctgaaataagtcataggtactcttgcctaaaatgttctctgaattcttaatcagtggctgtgcagtgtaggaacaggtagttacatatcagcctattatgtaggcaaaagctatcagtgcatctcttatgttataaaccccaatcaactgattttttttcttttaattcctttttctattgccgttgctggaggtcaaacttaggaacttgctcatatgaaacaaatgctctatcattgagcaacaatccagcttacatttttcttaatatcaatagataggtcatgattttgtcttttccctagagatatacctttttttttaaagagtgattttaactaaactctttcctttaaaaacaggtaagttgaaatttacaatcccttgaacatagttttactggtgtgttgatacttttcagtacctcaaaaactgtacatggaattttcaaccagttacaataagattcagatattttctcttcatgtcacaatcctcatttttcacataaactactattctatgcatgggtgtattagagaataagtaagaaagaatagatagtattttatcctttccatatattgttaccctcacaggctattatacaaagtgttatcttcttatacatacctatatggtggctatggtgatcccttactcttttgcttaggttgcatttgtggtaggatctttctccctgaaataaaaacttcagcatatggaatcttgaattgagaatcttaaggattactctttctctgaattatgatcccttcatattcaatgtgagagatgattaatcctctatcttaattaatagctaaagttaaaatcaccctatctattattaggctattctagttctcttacagccataaattagaatgtgttttgaaaactatagaaagtgctaatatcaaattaaacctattagagtcattactgtccatataaaatctgatatcttcatggatagtgactaatactgaaattatggttttagtgtaaactaattctaaagtaccctccagctgaaatgtcaaataggtgtcctctagatcctaaagagggaacattaagttttgtatttctaatttcataaaatctttaaaacatatgaaaattgagaattccacctctctttttataacagaattcaccctagacttgatggtcataagcatgaagtgttgaggcttgtgagctgtgcagaagagcagatataacagtagaccaaagatgataagatggctagaattattgtctgtagtacagctattttcccttcttggctttctttttacaatttttgttttcatctgtaaaataaacttatcacatggtccatccccttttacagttctgagtgaacatggtggtacaatgttgtgatacttagtgttctagatgtacacaagtagtggttcaacaattgagggacatgggacacttcatatcaaacaagaacgtcattccaatgtgcagaaataggaaagcatcttcttccctacatgtagggaactgtgatgtggaaccgaatgtagcttagcttctacaaatattatgacagggagaacaagctttatagatatctcagtagtatcagtgtatgcttgtggttcttcactttggtgtagaaaacaaagggtagtttacattttgtctgaggtggtttatgaagacatgtgcaaataaaactttaatgagagaactcagatcattaaggcctcattgtcacaactaattcaggcatcaggacaattttaaaagtcccactaaagcctctggagaaggcaattttatgttttcgtagtacatttttccttgtctaaaatgatgtaaaatgatttgaggatatttttccttctattaaaaattctgctgggtggtagtggcacacaggtttaatccccagacttgggaaacagaggaacacctgtctacagagctagttccaggacatccagagctgttactcagagaaaccctgagcaacactgaatagacacaatcacagatgcataaaaaaggggaagtcatgaatttgagaagaagttgggggcaaggaaatagttgactaggaagaacagtagaaataaagtagaggcagaactcatgtatgaaattctcaaagatacaaaaataaagttcactcatatttgacaaaaacagacattttaaaacagcaaatgtggcatacacagttacactcccttgcactacctccccttcttctccattccagtttccctaatctgacaacagtttaccaaggagagcacatttccttcaggctgttaaaatttctttgaaactcacaagattctagtctcacttacttctagagaaactttagccaatctatatgattctgctctccctccatgctttcattctagttgttcaatccatatccaatcttcaagagtcagacagttcttatatcctcatcctacatctggtgagtcttcttggctctacatcacttgcattatatccaaattcctggccaacacctgttttcacatctttatgcagatgaaattttgattccctgcacccttatttgctgatgccatccctggtcctcaggttttatcaaagccacatagtcatatgcagcctagaatctctcaaatcagacacacaaacaacaaaagaagtccatatactcacaactcatcacaaaaacaatgtctaagatcaaaaccatatatgccccctaaaatcctctggtactgcagaaatgtcttctaccaagaattacctggatgaaccccaagacagagaaatttaaagaaaaaaccacaaattttgtgaaagttttcaaagcatttaaataagacataaaaaaatagcttagtgaactaagcaaggataacaataaatgtctcagtgatctcccagaaaaaaaaaaactaacatacacatgaatgagatgacaaacacaacttgggtatttgaaaactgattttattgtatagatagaactattgaagagaagtgagactgaaatgaagctggggttgaaaaactcaatagctcactggaaaccccagagttgggtacacaatcctgccagtttccattgaagtttttgtcaatgagatacctgctgggagagagagagagagagagagagagagagagagagagagagagagagagagagagagagaattctctctaaaggtgtagtcataggtaagtttaccacactccagtgcaaaccaaatatgcaagatcatatgaaatacacaaatttagtctgaatggtataaaattggatagatagggaaggggaaatttgaaagatcaagggtgagtttgatcaaagcatattatagaaacactcaagaaactcatacaatattatatttttggttgtgagcctagcctttaacagctgagctatccctccagcccgaaactcatacaatattaaaagaatatttgagaatataactcttgtatttaccatctatccatctgtctatattttgccaccagcacagcactatttttatgactatcctgagatgtgaacacagatggagccccagtgaaaggccaaagatacactatcagccaggtctatcctgcagaacaagtgaattttgtggtagctgtgacttgcttagtatgggtagggtgttgtctgcattaaaatgggtgtctctaggacaatcactttttgaaagctcagccaacatgggtgaccacccaggaaaaaatctgtatttctggaactcaatgaacaatttacaagaagcttggatagagagtctcttctttctagcattttgtttttactgttatagttctaaggacccaaatttgggaatctgtgtctctataagatatggatctgggtaagtttcattgacatcctgagtcttttaagtggattgagacacattgacttcaatttttatttttttattaagcttttaatctctctcctctatcaaggacaaatgtttcaatcagaacaaatagttatagaacatcaattcaaacatgtagtgtggtgtaaagtggagtactgtaatacataagattggaatcttggtttttaaaactgaagtgtcttatttcaataataaaatctccaaaattaactgtacctaatcaaaataaaaataatgaacagaaaaggcttcatctatgaaataacttagggtaacagaagagaacaggaggactgaggcagaaggaatagaggaggacaagaatgtagatgccttaatagaggtaaccagaataggtttgaaagaggtctggcacggggagatgttaggggatctacaggatgaccacaactaaggatctaggcagtagtggacaggctgtctttgatgcctttcccttataatgagattgatgatgaccttggttgtcattcttagatccttcatccagtagctgattgaagcataaataggcacccacagctaaacactgagccatactccaagaatccagttgtggagagggaggagggatgagctcaagatccaagatggtgctggagaaacccaaagaaactgtggacctgacctcctgatatcatggagaccctagtcataaagctggagaaacagcattggaccaaaccaagccctctgaatgtgggtgccagctagaggccaagatagtctatgggacatctaacagtggagccagtgtttatccctagaacaataatggactttggaagcccattccaaatggagggatactattgcaggccatatacaagaaagagggcctagttcctctcccaaatgatgtgatttactttgatggttgcctgtggaggtcctcactatctttgtggagtggttgggggtggttggtggggttggtggggagcatgggagcataggagggtgagggaatgggggaatttatatgtaaataagagtgcttctaaaataaaaataataacttctagttaggcaacacaaaaaagagaaattaaagttaaaaagatcataactaaaatatttatagacaatgtactttgaagttttacataattttcaatcactttacgtttaattgcccaattctagtgaagctaatgctttcacagcaatcttcttgaatgcattcttgacatctttattcctcaggctgtagacaagggggtttagcatggggatgatcattgtgtagaacacagatgctaccttgtcagtgtccatggagtggctggagctgggttgtaagtacatgaagatgattgtaccatagaagatagaaacagtggtgaggtgggatgcacaggtggaaatggctttcttacggccctcagcagaacgcatcctcaggattgcaataaaaataagtaggtaagagttcaagataaccaatatagttaaagtaacattaaatgctgccaacataaacagtatgatttcattattatagatatcagaacaagaaatagccagcaatgggggaatgtcacagaaaaagtggttaattacattggaatgacagaaagagaggtggaaagtgaaggcaacatggatggaagattgcaagagtccactgatgtaagaaccagcaacaagtagggcacattttgtagttgtcatggtggtagagtaatgcaagggtttacacactgctgcatgacggtcaaaagccattgaagcaataaggaaaccttcaataatggcaaaagctattaagaagaacatttgggccgcacatgcattgtaggacatgactttgtgttctatgacaaacccttctattaccttgggagtgacagctgaggcataaacacagtctaccagtgagaggttactgagaaaaatgtacatggggttgtggagtcgggagtccaggagaatcaacataatcatcccaaggttcccaagcagtgtggtcgaataaacaagagtgaagatgataaataaagggacttgcaactctgggacatctgttaaccccacaagaataaattcagtcacctctgaaatattctgcatctgtgttatatgggaattatgacaggctcctagaatgaaaggaggaaatgaaaaattattgtagatagatagattttaccacaaagctttacatgtgaccaagttttctaattgaaatgttagcatcatctagtgtaaaggagcctaaactgaatactgtgtggaaatgggctgaatttatgccacttatctgggtgtagtacaaatggagattgccatttctttcctggtatagggtttcttattctgaatttaggttttcttacagttttctgagatatgataatatttattttagtaacccacaaatgacagatttgctgtttgctacatctgacagacacacttgtctaaaatatactgttacttggcatcaaagagcaatgctatatgttattagaaaacatatctaatgtatttcccatctctgatacttgtaccaagttcaactcactagctgcagctatgaagtgattataggtgctgctccatgggtactctgatttttttctctaattttccaaggacttcccttggattcttctatttgaatcatggaacagatgataactgcttggtgtatggaatgtattatttgtgatacagatatatagcaatacacagaaatctaacagtatagtttttcaaacagtagacacaatttaattactttatttacatgtaatgggctttatttttcacaggggctgttatttttcattaccatcaaacaagtcctttatttgtgtttgagtgagaacagattgaaaaggaatgaagagttacatttgttctctctacagaatcaatgttttcaaacaacatgtatttcgtggtctatattgtaccatttccctggtagatcaagtaacaactgattatgcagctatacttacatgtgagcttgcctcttaacaagaatcattccaactttggaatcttagggatattccttcctctatattagtaaccacttatattcaagataattgagaatgttagtattttatttttaatggccatggtgaaattcatttttcttcaaacctatagctgcattataaaggaatgcataaattctttcaagtcataaaagatactaacatttttaaaatcatataaatcatacccattatttccatgtactttcacatcttttcctggtttcctcagaatttttagctcacattatgaatgtctaaagttattgttctcatgaaacaggacctagtaattgacatttcaagaagattttggaagtcctcagctttctgaaattaaaaaaaaatgagctataatctgtggacttctattcccataatacatcatgaatatcagaaaattagaacatggtctccatctggagagaaaatatcatcacaggatccaaaagtccttattagcatgaagtctggcttccctatagcagaatagtagtgtccaagaataaaaatgattattagtaatattttgtctatgacttagttgcttcccctttctacaccttaagttgactttttgtttgcacttatgagataaaaatgactgggtaatttatcaccatttacagatatggcccatatatatacttactttatgataggaacagacaaatatgaataaaaagacggagtgtgaaatatctcatatcaaatgtattgacaaaaatccacatccaggaaagcatcttgctgttcttctccacaggtagagctctgctatgaaatggaatctgattttgtactactgccaataggaaggcagagtccacaagcagcagtacatatgtctcagggggaatcagtatatgttgagcgggggtgtctggagactcatgaacttacggttcttcagcctgatggagaaagcagaagacagtgcttgtattttgtctaatagtacttatgaagatactggaaaataaaagcttagaggaaatagcttccagttattaatcacagctgttccacacctagagtgtacacaaaaaaattgaaagcctcacttaaattttagctaattatacaagtgttctgataacatattttctcaatacttaggagatggccccagaacatttcattctctcattttaagatttatgacatgtttttcttatcacaacatatgtcatttggatatatctttttcttcttatgtatttaaaaatttaaaatgtccctcattctctttcagagtctatgtctgcaagtcttcctgaaatcccaactgagactttctctgaaactctcccgatctattatttgtcccacaaccaatgctcctgtctagtctgattgatcagatcagcaggacttctctgcttccagaagaactcaccttactttcttaacttcagccaacttaacttcagccaaccactccacagactaaatatcccatcactttctccaaagtctagccaggtgactctccctgtcctacctattcataccgcgccacaaacctccccatcatgcatgagtctcacatggtatccaagcctggtttggcctcccctaactgtaccagagaacatctgtaaaatttggtcaggagtctctgtagctatctcccaacccataagaagcttctatacaatgtcaaaattacacccagacatatctacctccctatcccaggcttagaaagaaaggcaaatactgaacactatctcaaatacctctacccacctgccttcattccaccctagccactttccaattcttgactcaacctgtatacacatcctcccttatgccccaaacttccctatctatataagacttagaagtaactaaagaaatctatgttttcatttaccttttcaaaattaccagattataaaaggcaagctaatatcttttctccaaaacttatcagatctgtggaaatctttaccaatgggaatttcctatatgaacatcataacacagaatttaaaaggacaatcacaaactccatcaacaaattcgaggggttgaaaaaaagacagtgaaattaagaataaataatttaagcagaataaacacctgagtaatgaaaccacaatcagaaggctgatggaaatgaagaagacaatccaagaattaagaatggattacaacatggagatggacaggaaaattgaagagaactaaagctaaaatgaagatgaaattgtaagtctaataactaaaatagaaaaagcagggtgtttctaaataggtaccagctgaacttctccacattcaataaattatgtacatattgtctttagcaattgggcttagtcatcagtttgtagagagaaatttatagtcttggcaatatgccatgtggcccctttgcccctttggccaacaactcaattagatgtaactcaatccagtacaggggggtgtcatttgatgacaagagatgttcatttaggtcttagactacactagtatttggttattgaattatgtcacctacacacacacacacacacacacacacacacacacaggcttctactctattaagtttctatactaccattcaagcctttagccctatgttcaagaatttttgatacaggaaggtactacccatactatcaaaggagaaatataaacatcagccagaacaaaccttttatctacaatggtgtactgcctgcaaaatacgctagtgcaattgtagcacaaagcttatgtgagtaagcaaccaatatctgatttgattgaaggcccactctatgagtcagaacccatgccagctgccagcactgtttgcatgaccaagaacctgatgttagatagcctatggacctgaggtaaatccaaataacactggtttaaaatgaggaaaaaagtgtcagtaaactccctcctaatgacattctgctgtcctgatagatcagtatcagtgccttcatcagtcatcattggtgaatatttcagctgtagcagatgagaagaaacacagagaacacagccaaacattatgcagagagtgagagacattggaacactcagccaaaaatccatcaaccagttttctcatggtccattgaactctgaggaaaggtggtagaaaaagtgtaagagccagaggggatggagtacaccaaggaaaaaggcttctaaatcaacatgaacaacacacatatggatgcaaatagactaaggtagtaagcacaagtccttcacagatctccatcatattgtgcctggaggtgatttgaaaggagaagtcactacatgcccccatccctaacccagatgtcatctccaattaataaccacttgtaagagaaactttagtttcttctaacggtgtctcacgaggaaacgaagtattcttgagataggctacatgcccagcaatagatgtccaaccaaaaccaaacccagtggcatctttggaggtttcatgtctcacagaatcttgtcaggaattctcctttttaaaatttaatttatttattttaatttattttatctacacacatatttttctctgtttttacactacaggtcctttgtatatgtattatggtttccagttcaggatattaatgggattcctgagtgtgtgaatgagtctgtctccctttcttgtgccttctgatgggctcttgtacttctatttgttttgtccagttctgatgtattagtgtttttatcacattatcatatatggaatatctaatgagtaattaatattacaaatttctgtgagaattttgtaaacatttgtccaaggaattcactgatatttttgtatatagaattctacagtttagcttgtaccaaaaatgtatcctaactcattttgagaagatgtggattaaatatcaatggtttcagtgttcccactcttgcatctaacctcttacccttcttgctctcttttctcctgtaactactatatacaaattgtaattattatattaggggatatggaattgttgaatgagaggactgaaaatgtcactgttaaaagacagtatatatttcagaagcaaaaaagtaatacaggaataaattaaattcaagaaatgatgaacagtttgcaaatactatcatagggaacaggagttacaatagagaacatacaatattcttcagtttaattatttgtctaaaggcagttctttttaaatatttgttgactttttatgttttttattaaggcaattttttaagtctaaatatattttcttcacattttttcttctccaaaattgtctagaatatctcctcttccctacccacccaacttgaacttattcctcaaaaaacaagccaaaaacctattacaacaatcaaccaaaacttagaaaacaaaatacagcacctaaaaactaaacaccatattgtactgaaataaaagcagtacccaataaactgtgtggttcaatatttgttggccaactacacatgaacctaagctcagccctgaaatgactaatataatcaaattagtcagttgtagaaaacctatattcctttacaagtgtgtataaataagagttttgttaataacctataccccagttgataggtttatagtcattcattcattttaaaatatgtgtaacaatataaaatatacttaaatgaaacaaaaatatcatactaaagttggacagggaaaaaccaagaaatggaaaaacaaccaagagagggccaaaaatcagagacccatttatttgcaacctcaagaatctcatgaaaacactaaattggaagccataatataaatgcacagaacttggtgaagaatctgtgcatgctgcttcagtctctgggagttcatgtaatctttggtcatgctgacttaaagggccttgtttgcttggctttgcccatcacctcttgctcttacattcttcctgcttcctcttccttcggattctctgagttccatagaagagatttgatggagacatcccatttagggctgagtattccaaggtcccttaatccccatgtaatttttgactgtgggtctctatacttgtttcaatatggtacaggaggaaattctttgatgatagtaatataggtacttatcaatgattatagaataatatcattagaagtaattttatcaatacagggttttttttcattttataccagtattatttggttttgccttaggtctttgggctctctagtctcaggttctcattcacccaaacagtttcagattttgtcaaggactatcttatggagtgggacttaagtcaaatcagttgttggttggttactcccacaatctttgtgccactacttccctagcatgtcttgtaggtagcacattattatagatagagggattttggctggcttggtgtttgtctttcttttttgataacatgctaagtaccctcctgtaacatggggtagataacctatgtaggcattacactgccattgcatgttcaatgaggcatgaaggtgtaatcttcagcactggagtcttgtatcattttgtagaaagcaacctatagccttggcaacagctcaggctgttttagaatacccatgggatgctgtgaccaacatgtctcttagatgtaacccaataccagtattgcaaggttcatttggtggaaatatatgtgaagttgggtttctgtttccccattatttgtaaatttcatttagataaccttaatatatgctttccgtaataacctgagaattgtcctttcaagatctgtaaaaaatggtattagaattttgatggggagtgcattgaatctgtatatttcttttagtaggatggtcatttttactatgtaaatcatactactccataagcatggaagatctttccaaattctgatgtcttcttcaattttgttcttgaaagacttgaagtttttattgtacaagtctttcacttgttaagttggagtcaccatatgatattatttgaggctattgtagacggtgctgtttccctgatgtatttctcagaccatttgttagttgtatataggtggaatactgatttttgtgagttaattttgtatttagctattttagtgtatctatgaattgaaagccaaccttttatttttttctttagttttaactttatttagttttaactttagttataactttataaaagttataatgaccatggtgtctctttatagtcatagataccctaaaataatatcttaggcctttttgttccaaactggtcattttttaaactcattggtttatgagttctttgtatattctgaatattaatcctgtgtcagatgtatagttatcaaagattctttcccattctgtggtcttctggcaaagtctagcttcagcaagtgaaagaaggtggagaggaaatgtggagttggcactactaggcatataagaagaagacaaaccttaactgaggggacaaaatataattctcttcattattcttttctgtctctgctgtggaataatccttctgtacactctgtaaatttatggctggttaaataaacaagcttactagccaatagttgaacaggataaagttaggtgggaaaagccaaaatgaaaatggtgggataaggaaggacaaagtcagatgatgccagccaactaccaagaaagcaggatgtgtagaaagtatggcaagaaaccatgagccatgtggcaaagcatagataagaactatgggttagtttaaatataagagttactaacaagcctgagctattggtcaagaatttataagtaatcttaagccactgaatatttatttgagagtgtctgccagacagaaaatttctgcctaccttaattttctgttatctgtaagacaaaaatttctgtgcaaggaggaaatcacctcacaaccacaagttacatattttccagaatcaaattgcaatttttacacaggaagaaatcacattatgatcacagttacatttttcttagaaacctacaaatagttatctattttattgtgtattaatttttttcaccacagtatctttagcccaaatcaatgatttttttgttgtttggccaagtataaaacacacaaagttaatttctgccagttcctttgtactgtcaggcagctgtctgtggtttcagtctagcaaattcctatcctatttctattctacaaaatttcaaacaagtggtctagttcaccatctattctttttttttctttacatgtaataggtcatttgatttttttcacaactttgttttttaaaggtgcataccaaagcctgtgattaattctgtaagctatgtgaccaagaaattcaaacttaatcttatgtgtaggaacataattgctttctttgatcatcatctggcttttccacaggcataagtcatgggtctataatgcatgacatttctttgttttcattttccattcttggcatgtctcatacctagaaagagggaaggtaacttctagccttacttttatatttcttgtatgtcttattggagtaattgacagaatatcttaaaccatttccctaatcatctttactatctgccctaacgacctgcatctttaaataattgatctaactgagtgtcatagctctttaaattgtcttcattatgatctacaagtaaatcgatcagtgtggagtgggattttcccatgaaacaatcataatatacaagatacattgggattctttcacataagtaaacacaacatgccaaatacactaagtactcgagaagagccagcaggaaaaagcacaacagaagcaagaatcctagaagaatctctaggattcacctattgtagctgtgctatatggtaggttctgttccataagctccattgataactgcagctctactgttatgtctaccaccagacttcctcttcacttaaatgatttttttcttcagccatgcagatttttagttatatgaaatctcaattgtcaattttttgcccttaattcttcagcaaatgagtcttatttgggaagtttttttcctactctatatcatggattaggtattatcttcattttcttatctcagtttcagtgtttcaggttacatacttattttttttttatccatttggagttagttttctgtaaggtgacagataagggtctaatatcgttcttcatgtggacatccagttttacaagcaacatttcttgaagattctttcttttttacaatatatgcttttggtaactttgtcaaatattaagtgactacaattatgtgtactcatgtttcagttgaaaattttattcttttgctccttatgtgtgcttttctatcagtgccatattgttttcattgctacatcagtaatatatctacaaatctataaatgtaatttctccatcattgtaatttcacccaacataattttgcctatctgcaggattttgtggttgtatatgaatatgtatattttttctttctgtgaagaataagatggggagtttgattgggaatgcactgaatatgcaaatagcttttggaagaatcgacattttcacagtattatttataccaatccatgagtatggaatatctgtctattttctagtgcccttctttagaggtttaatattttcattgtagagtttctatacttccatgattaggtttattcaaagatattttatttcctttgatgttatttttaatgggaatatattcataatctcattttctatgttggtgtttgctgtgtagaaatgctattgatatggactagggctagctggttctgtttcctgccatgttgttgaatatttgtatcattcctagaagttttctcataggatttatagaatcactaatatagtaccatctcatattttgacttgctcctttcctatttgtatccatttattttctgtattttgccttatgttccaactactattttgagtataataaaaatcagtaaggatagtgtacatcccattctcttttatgacttcattaagatttcctcaatttagggtattgttggttgtgtgtttatttctatagtctctctggtattagtcttgtgtaaaaattagtgtctcctgtgttttctttatgtttggtgttatatttaaatttttatgctttttattttgtgaaaagcttttattcttcttctcaatcatcaaagatagttctgctaggtctattaacctaggttggccctcatagtcatctaagactcagaatgccttgatccaggctattctggctattcatggatttcatgtcctttagcaaattagcccttgttctgatggattttcctttagatgtgacccacttgttgtttttttctctgctttttattctttgtcttgcatttttatacactttccttaatatgtatactttatgttttaactatgatattccatggaaatgttattttctggtcttgtgaattttatagtttatatgtattttcttagcttagtgaagcatacttctatgattttgttggagatcggatctatgcaattgacccgtgattcttcttcctatcctgtgactgtaattcaaatgtttactttttatccaggtgtcccacattttctgtgtgttcctttcctaaccttaactttttttttcttataaaaggaagcatttaattagggctaacagtttcagtgatctagtccagtttcatcatggcagggaatggcagctgagagttctacatacagatctgtaggcagtagcaagaaaaagacctgaaagcccacttccagtggccagtgacatacttccttcaaaaagacctcctaagcctttcaaatagtgccactccctggcaactaagaattcagatatcttagcttatggggccattcttattcataccacctcactcccaattactcttttcatctccttctactcctattcatttctttctcttccaaagtagtcccatttctgctttgatatctgttttcttttcttggtcacccaatcagtttccttagtatttcttaccagagcatctcaagagtgactgtaccactgaagaaaatgtccttctcacactgatttttatctgcatataagttctcagggtagagtgaggttctgtgatggccttacttttctttttaaaaaatattatttatttcattttatgtagattggtgttttaccctcattgtgtctgtgtgtgggtttcagattccctgaaacaggagttacagttgcgagctgacatgtgggtgctgggaattgatcctgggtcctctgaaagagcagccagtgagccatctttgtagccctgactttacctttctatgacagaaagtcatattaccagtcttatgcaggtaataatatctgctttaagttcaagagtacaatagccacatcatgcctggaagtcagcatcacagattaccccctcttcaattgttcttcctgcaatgcttcctgagccctagccaagagtgtagagatccatatagggccaagaaatttatcgtcttttcttttgactatttttttaaaaaaacattgtagagttgtggtgctagcacatgcatttaatcccagccctcaagaggcagagacagagacaggtagatctctgggagtttgaggccaatctgctctacaaaatgagttccatgacagccagggctgttacacagagaaaccctgtctcgaaaaacaaaaacaaacaaacaaacaaaaaacaacacaaaacaaaacaaaaaaactcaaagcttcattatattacgaattaaaaggaatgctttatattccttgcttatctactctagattctctatttatctttgagtcctgttattctaacttctgcttaattcattatacttgaaagctttcctttgagttttctagatgggttactgggtttctaaattttatcatttcaccttcagtactcttcaatatttttatctctcacttgaatttcattctcaggttctggatagtattcttcatctccacagagccttatgtttgtatttccttgagtatcactttgacatttattctttataatctatttctcttcaatttcattaagctatttctttgtatcctctttaaacaccttgaatttgtttatgaagtctatgttttttaatttaattctgtgtccttggtttcatctaggtaattctcattggcatccatgtctaaaagactgttataaattggagcaaagatgttggcttaatttgggggcgattattggtattcttgaaatgagatttgagtatgtggacccttgttctgagtttgttagggacaaagcagtctgctagagaagaaaagagaacatgtggatggattggatctagaagttggaaagatattgagtaattaaggcaggtagacagaggatactgggctgatacagagtatgtgctttctgtacaattcctggaattatggaggtagatctggatgggaattaaaggttggatatggtcatagagttctatatttgggggtataggtagtgaaaatactagacaaagcctagggctcatttgaggtgcagtcatggaagacaaaactatgctgtttcactggttatgggactcaggtgatatctagatggtttcagaaaagatgtgaatgaggagaggatatcagggtattcaccaggctattctctaaaggagtaaatgaaaagtttggatacctaatgctgtggtggacaaaaacacattaaggacctttttgtggatgtaggtaaggttggttctgatggatcctgaaaggttgtctccagtgttggaaatgttagtctgaacacgccaaggcatgggaaatggagcctagcctagactctggaagtctagacatggggagtctaggcaatcaattggatgctataggctacatggaagtgatcagcttagatcctttgagtcatatgggaagtaatgatgagtgtggtggagtctgtgcacctaaactatcttctgacagtaattctagatgtcatttaatcagttgctatgaattaaaaaagaaagccagaaatttaaaagacataatttgatcaaatgatttgagaagtgtaggtacagttaacactgattgtcacgtccacccttgaccagcaagaacaacacaacaccgaggaatcttcttacagtttattcgggaaccttgctttacaggaagtggcccctaacccaggaaggcaaggcttaatatatccagcaactaccaatcatctatgcccaggtggcggtggcacactaggatacgttgtcaccaagcagatttagaaggatacgtggcctctctcttaataagaagttgtttatcactgagagtactcgatgtcgggctggcggaaggcagaaaccggtgccatcttgtaggcatggtactctgcagctcccaacagttccccctttttttgttttaaaattataggagtagcagtatctatctgttgttagatttcagtcatctctgtcttaggttcaaccccagtgtccttatcttacacgtcaaagagtcagtgtcgccctcacaggctcatgtcttaggtcgaagggaacacatcctatggaagttagagttaccaaatcatctacctgttcctgcaacaggtccattctttggttcacagttagaatgccagctcttaagtggccatcaatagattttaaggtagttaatgctgtggctgttttttctacaacgtcattgactgtctcagctgtttggacctgtgcagccatggcaaaggcagcagtcgtagctgctgctgcagaaagggttatggcagtaaccaatgctgcagttatgccaaaatcccgtttggttctgatgatttccataatgggaaatgttcctgtatccactttaaacggaataggaacatacatagggatcctcatcactactgctgtattagcagaaccattccaacattgactgacaggagatgttagtggaattacacgagattacttctttggtagcattagtagcattagagagcagaaagaaaaagggagcttttaaacatactgggctagctggaacagtgaaattatccaaagttttatgtattgatagattcttaagggaaggtcccttctcatccctagttccagaaacattaagaagtcttatggtgagattctggagaaccgcaaaaggttcaagggaagtaaatgctccatggagagaaatattagtggctgaatactgggcagtgtcaggatcaaaattcacacagggcagacccaaatcacaactagtagagaagaaggcaggtaagactttagatgtatgatgaacaggtaaaggaattggccatgctttagctatggcccacagggtttgtggactggcttggatcagcagcagcggagacatcagactcatcagcaggatcaatattggaggcttcatcttatttgttgcaccatctcgtcagtctttctggaatccacaccgattcttgccgatcctgaggaaaaacaagcagaacctctcgcccatgctaaaactgggtctggtccatgccatagacccgtaattacatctttccatttgacgtatcccttccaggtgggggcctgattctgatgactgtctgcagcagacagaccctgagaatccaaatttaaaaaatttaaggtgaagagagctaaagataattgttcccttggtgttctaccatagcctattccccctttttgttttaataaacattctttcaatgtgcgatgagctctttcaactattccttgtccttggggattataaggtaggccatggtttaattggacctccatctgcttacagaaggaggtaaaagattgagttgtataagcagggccattatcagtttttaattgctgaggttttccccaggcagcctacgcctccaatgacattgtgagccttttccccgctcataggtgtggcatggatgatgcctgaacaggtatctacagacacatggatgtatttaagagttccaaatcctgaaaaattgggttacgtccatttgccaaattttcaatggcaatagccttctggggttgacccccacgctaggggggtgcaaaaaggttatacactgttgacaattcaatactatctgtctagcctcctctcgggatagctgaaacctttgttgcaaagttttcgcagatacatggaattgtttgtgaaattgctgcacccgctacacaggggaagcaaaaaatacatattcccctctagtacagtgatctatgacctcattgctttttgatagaggtccaggcaagttggtatgggccctaatatgttgtataaaaaatttctgatcgcgatgccagatcaacttttgcaactcctgtaagagtatgcaaactgtactattaggtttgataggtcctgcaacctccagggcactgacagcattcacaacatatgcggaatcagagattagattaaaggggaacgggcaatttctaaacacttcaaggacaattttacattcaataatctggggggagccaggctgatattgaaattgcactggatcctgatgctctatcatataggctccacagcctgtcttggatccatcagtgaaaatgtttggggctccagcaataggagcagctgcagtcattttaggaaaaatgactggatgttctttaaaaaatgacattagagggtgttttggacaatgattatctatttctcctgaaaacccacagcgcagaatggcccaatcatccacagttccataaaggatcttaacttgttgagcagtatatgggattatgatcttatttggtagtctcgccaggtgtcatacagagtcggtatgccaactctgccagagctttgactattttaaagtcaatcggcccatgatatctctgttggttaccatccataaaaactggataagccagtggttgggcaatctgaaactcagtgcgaatggtgtgccacactttcagacagaaggtagaacaaccaggaactcttacttcctcttgtgagcagtaggggggaggagcagtagggtccttgctttacagttgccattttagggcgctgtttttctggtgcttttaaggaatgtttttccatgagcttaataatctccccctcctcatcctccgtgaggtcctcatcctaatatatatcctcctctgattctgaatcctctcctggttcttttaactccttcctcaactctcctagagaaggatagactcactttttattccctttccgtttttcctttccagcctcactttctgactgttctgatctttcttcttgaagcatttcaagggcagcttgtccattcgctatagctttcttatttccctcttgatcctctagacagctgcgtactagtcgccataccgcccgaacacacagcttcaacgttccttgttcccaggcaaaatccaggtctttccctaacttatcccaactagccacgagagattcccgaaaccgagaaccagggtgcaatggcatcacattcattcaggaacctctgcaacatggctttagttagctttaatttcctataacgaagcagctctcaaagagccagaaaattggatgtgactgtgacgatcccattgtgcttttgttaattctactcttttagtttgtgcgctccggaggtgtgcaagttggataacaccaccaaaaaacaaaagcccacactgcaatgataaagagcagccaaatcaccactataatagtggggtccattcactttactctcactctgcaaattaaagcaggagcgaggccttttactttcagttcgcttctgctgcgaacagtcttgctcctatccggagaccttattgcctctttaccgaggtacttattgctccttaccgtagaacttattgccgcctttgccgcagacctacttgtcccacttaccttgggaacttaccagtgccgccccgactatgagaagttctgattccccatacgggccaccacttgttcgcgtccacccttcaccagcaaaaatgacgcaacaccgaggaatcttctcacagtttattcgggaaccttgctttacaggaagtggcccctaacccaggaaggtgggccttaatatatccagcaactaccaatcatctacgcccaggtggcatgctaggataccttgtcaccaagcagatttagaaggatacatggcctctctcctaataaggagttgtttatcactgagagcactcgccgtatggctggcagaaggtagaaactggcgccatcttgtaggcgtggtactctgcagctcccaacaactgatcagtgcctactaatgggggatattcttctgtgtactgtgaatatgtgtttcttttattgattctgggttacctaagttaggatttttttttttatttccatccatttgcagtttgcatttccctacagtaatagcattcctgtcatggaggttgagtaatgtaggggcttacacactgctgaatgacagtcaaaattcactgctgccaagaggaaaacttcagtagtggcaaaggcaatcaagaacatttgtgcagcacatgtattgtaggatatgacctttttctgtgagaaacccttccattaatttgggaatgactactgaggaataaataaagttcaccagggagaactgaggaaaaatatatgggagtgtggagttgggggtccaggagaatcaacattaacatcctgaggatcccaacagttgtgatcaaataaatgcgagtgaaggtgataaataaagggtcttgaagctctgttgtatttgtttaccccacaagaaaaaaactcagtaatctcttaaaatattctccatgtaattcatttggtaatttctatgagatatatcacataggaggagaaaaacaaaatttgttagtttataatgtcagaaagaaaatatgagcaagttcttgtgcctatatttttttctttctattcagaggagaagctacatgcaaaatgacacactgaacctgggtaggagcagacagtttgttcatacagaaatgctacaaatggtaattcaaaactttataagcagtggcagccataggtgaatttagaactatatagtctgttctaaacagaccatagaggtttggagaatggagcaagccactgccacaccttacctccttagtgtttctgcagacaataaaaagacttcctgtttctccttgtttatatcctatttctgcccagctacctctctttctgtctgtctgaaccgacctccagaactctatgtttagttagtggcaagctcattctctgaccttcagacatgctttatttgtacaagcaagatatcaccaccctgtcagaataatcaaataaacagagtaaagattataaataatgggttttacagttctagcatacctcttaacctcacatgaataaattcattttcccttaaaatagtctacatcaaactcaactgggaatgatcattgcttgctcctagaatgtgatgacagaataatatttgaagtaaagtgaaggtcatgatacagcatcttttcttttgtgaaaaacctatataaaattcttattagggcaggttgcatgaggccataaatttgagagtagtataaatggacattgaaactaaatttagagctcatttcaaattgtctgttatatggtattatttattgtagtaagtaaacccaatatgtttgtttatattttgcaaactcttacaagctcagttaaggcacactttgtttaagtatgcatcaaaagtttattcaagagaaagtaaagtgtatgctttgcaaaatcatggtcacacaaaaaaaacaaaattcatttcctatctctgacaggtataccaagttacatgtagtatagtgtcttggggtgctgctttaaaaatatacaccatttcttcctcatcctgaagtctttaagtgaatgtttcagactaaaatttgacacatttgggtttctatttgatttatgagacctctatgtagtggttaattggatatatttaaatatgtcaaaaattaaagagaagtttacttggcttctctccatgtcttgatttttcaagtaggctgataatttggatttttgtcatcaaacaagtctgcattattaattttgagaggagaatataggaagcttgaagagttgctttccttctgcctatagattctgtgccctcaaccagggtatttcctaatatatttagttgttctcactttcatgatgccttaggtgacacctgccaaatacttttttgggtatagtatgaagtggtcttttaagccccaaaatgcttttagtctacagttgggacttggtcatttgttttacatgttaaggtaagaagtgatgtagccttaccttaagggccttctaaatgagaaacattattcattttatttgcatattgtatatgtgtataggtatgtgtacctatatagcaaataatgtgtaagttcttttcaagtcataaaagacactatagttttaaaagcaaacagtgggagctgttattttacataatgtatctcatctcttcctggatactatatgtttctcagttcacagcatcaatgccaaactgttgatgttcttaaaataagccacataactatctaacaagtcaaagatctacaatctctgaagttacaaagaatgtaattgttaatgcatttctaatcctgaaaagtgttctaaatagaagaaagttatgaatgtgttgtcaccttttgagcatcactatctttccagagtcaaatagttctgagaatggaaatttataggcctggagtaacacaagctatcagaaataataatttttcaaagctaagaaaaattgttcaaaatatataggttgtcatgtgtcttaactgtttaagttttcttagtattagttttcatccctgtgctttcatttgaagagtaaagaaggttggatattttaccatccttgacagttctaatttgctatgttgtgacattgaaatgcttttttggttcttcctggtatcagacaaatatgaaaacataggaaatatggaatctgtttcatatccacaaaactgtttcaatgtctacatccaggaaagcatctatccattatcctttcccatctgtgaagtgcttatatataatgcaaccggggctgtgcccttgccaacatcaaggcagagatggaagctttgcctatttctcaagggaagtaatgctatggagatggtgatcgccacatttgactttcaacctgaatttggtgagcacaaagaagaaagtgtcagaatttgtttgtgaaatacttataatagaaaagtagaatagaatatcagaataaagaacacaattcatcatatcagtagggaaagcatatatttttaaagaaaagaaatactagtgcatagttgagactcagatatctctaagatagaagactagagagttgtgcacatatactgagtaatgactaaagccatagaaagaatcttactgaaaatcttatagaagatgagcaccaatgatgtagtaataaaagtacaatttacaaatgactaaaaatccaagtagacttttctccaaagtacacatataaatatgtacataacacacttcaaacaatgccaatatcattaaatattaggtacatgcaagctaaaaccataattacatatttcatctacacagggtagccatgataaaaaataaagatactgtcaaatgttatgcaatatcactatacagaaatgtatatccaaacatcttgatggtctcataaaaataatttgataaatagtcaggtaactcaaaccaattaaatagacagtcatcatataactcatttatgttgctacaaagaaacagtgtggattgtgtggttcataatgaaaattatttttggcagttctgaggcttaatacttgcatattccatacggcacagctgaggtggaagaggaatgtagcaagagagggaagcagagacttggggtttgcccttgctcctctgtccactgttctaatctcaagatctgagtaaactgagctttgatcagaagaacatccttgagatctttgtggttattatgcactgttctgattgatagcaactgacagtgtctgttcttgcttcactctccagttttactggatcacagcctcattttttaattcatttacagtaggtcagggaggtttccagatcattatcttctgttattgtattcacaacttctttttaaattttattctaggtacttaaggaaaactgcataaaaatttaatgatttgttaatgagaattattttctacccaaaatttagttcatcagatgacttttaacctcattacagacccacatgttttctaaatgacatattcttcagtgccaaagagaattgcaattgtctcgatcaagaatggaaacaaatatgcagggagctagaatatccttttccaaaattctttaaaaaatctttccaattcaaaagtttttctagattttcaaaaccagcatccacatataagataacatgtaacacttactttggagccagagttacattttatcattttgccacaaatgtcataattactttaaaataatatctttaaatattctttgggatagtcatacacaaacacaatatattttgatcatacccaactgcccaaactgttccaattttttatcatactatttcatgttttccctccactctctctatctgttagtaattactgtactcagttagtgtgatccatatgaccctggttctggtactatctcctggtacattgccaataggaggtatccatctgttgccattaactcatcaactggaaatggagcctcagaagttcatgctccagcacagattctcaactagcttaattttatgcagacaaaaagagatgctgtgtgtccatatgtatgatggccaatttatgcccataagaaaagatttaccagaactttccatcctctgacacttatgtcctcatgttctgtctcccacaatgttctttgtcatttggtatgctggagaggtttatcatgcttaaacactcacagacatgtattctcagcacttcaaccacttctaagtttcttcattaattactaacctgctgcaaaaaggagaagcttctccactcaagggtgagagtatcccaaataaatagaggtaagcagatacatttaggaggaaatctgacaatgtgagcacttagaaaagcatcaatagtagttctttccttggagaaataagagaagaaactcatttttgccagtgcacaaattctttgggttttcagtttaagtgattatatttaatgtatccactcattggctattgttttgatttgccttactaaacaccctaaagatatcaacagtgccatggaatccatctgaaactctaaagaatttccccagaattttttgttgaattcagtgtatttgcttcaaataaatgggaaattagggcaatctctaaatattttcatatttttaatgctttacattctactctccagattgattagacttttaaatgaaagtttagttttattttatggaagctattgctgtccaacacaggagttatacatggttaaatactatgtagaactctggtaagagaaattatgaatgtagtttgggtaaatttctttcttaagtttgctgaaatccacagagtgaatagttttagagaatatattgctctttactacagaaactcatctttagaactattttagactcaaaaatccaaaaacgtatatatcataaaactgttttggatgaaattctgggattatgcattctctcagcacatctcaaaatgtttatttaaagtactgttgaaaaccatagctttacactgtataaaaaattagaatgtagatatactcattgggcaaaagttcatagcatcaattataggtaaactgggttatatccctggacccatataataaaaagagaacgaactgttctctgatctctatagtggagttgtggcttgcacacacatgcacaaatcacacagacacacacacacacacactcactcacacacaaacatcaaataaataaactgcaatttcaaaaaatcagatgttttaaactataataattaaaatataaatggcattagagattagatttgaagaatttcattacaggtatgttgaacactttgatcatggcagtatacaacattataatgttcattttaaaattgaattgtttcttatttttgcaggaaatcaacaatttcctatcaactattcatgcctaaaaataaagatggaaataccatgtgtaaaggagtattataagaaatatagaataaataatttaagaaaaacattacaagacaatagatatctagtggaaatttccatagtttcaaactgatttgtaaataattgatttagcaagattatgattttgattttcccacaaccttcttgaatgcagtcttgacctctttattcctaaggctgtagacaagaggattcagcatggggataaccatggtgtaaaacacagatgcaattttgtcagtgtccatggaatgactagagttgggttgtaagtacatgaagatgattgttccaaaaaagatagacacagtggtgaggtgtgatgcgcaggttgagaaagctttcttccggcactcagctgagtgcatccttaggattgtaataaaaataagcaggtaagagttcaagataatgaatagagtaaaaacaacatcaaataaagccaacataaaaactataatctcatttacatggatatcagaacaagaaagagccagcagtggaggtatgtcacagaaaaagtgattaattacattggaatagcagaaggagagacggaaggtgaaggcaacatggatggaggattgcagaagtccacatatataggagacagttaccattagaacacacatgggatttgtcatgatggtagagtaatgcaggggtttgcacacagctgcatgacggtctaaggccattgatgccagaatgaaactttcaatagtagcaaaggctgcaaagaagaacatctgggcagcacatgctttggaggatatcatcttatctcctgtgagtaacccttccattaccttgggagtgactgctgaggcataaacacagtcaactaaggagaggttactgaggaaaaaatacatgggagtatgaagtcgggcatccatcagaatcaacataatcatcccaaggttcccaattaaagtgatcaaataaattagagtgaaaataataaataaaggcaactgtaactctggggcatctgttaacccaacaaggataaatccagttgccactgaaatgttctccatcaaagccattttggtctttccaggaaatgtacctataacaagatgaagaaaaattatggtatttgaacttgaccctgagatcttatgtgcctttttatgtgccaagacttcttagtcttgtgtgaaattatgcaagaagatgacctgcatggtaggtagagacagtcagtgtgttcagatgtaatgctgcagaggggaaccgcaatttttttgttcacagaaactgatacaggtggtacataatatttctgtgaggtttacttctcttttcttgtgtacttaatcacagtgttctcttaatcacaatgtttgttattactgcaataatttctgctaacattcttttctaggatatacgtgaaagataaatcagcagaaaacacaatgtggaggcatgttgtcctgccctgtttttctatgttagctggcagtgcacttttcatttctaataaatatcttaccaccttgaaggtatccaagagctaggactctgtgttaggaataagaagctatttctctaattcatgagaacattcttaattggatatctcattttaaatattggaaccttcaggaaattgaatgttctatccatcatattcttgatgaaatcctggttatatttcaccatgtgaaaaagcaaagaaacaatttttcaaatagcacaactaacatttttactgttttctttgtcatccttatcttcccttttcatataaatttgatgctttttatttcttgttgtcagtgtaactttgctttatttctgtttgagaaaaatagggaaagatggacagaagagttattctcattttggcctgtagacctgctgtcctcaccaaatcatattatattgtaaatgtagttgtgttcaactacacagtggctcaggtgacaaacaaatagctttactactgttcttagagtaaaagaggatgtttccagctaaagaaatctctgatgttgcttggaatgttgatttgcacacttaactccaaactacttcatatttactgtggagagtgattaaagtttgccattaaggatagcaaaagtaaaattaatttctctatttatgttctctctctgttttattgagtatatcctctacactaactattcctaaaacatacctaatgatagtccagacagaagaaattttaggtatttagagcactctggtagaattgaaataacagtgaataaaaaaggagagaacacatagaaaattttatctttagtaaggctgtttagctatcatggcattagcccccccacacacacaccctttttgtttgtttgttttcatttgtaagataaatttgtttagaaattctgtccttctaactggctatgtataaactggctatatattttcattttgtcctaggaaatagggctaccaagtattaagcatggaaaacccacatatctatatcactggctcaaataatcctcttttcccacctgtagagattctcctttctgatttgtggagctccgctgtggactagagcctaggctgttatcttgccaatattaaggtagtgatgataactttgcacacatctcaagggaggcagtatttgtcactgaatatctctagagccttatgattccatattggcctttcaaactgaacttgatggagacagaggagggtacattgcatttggataaaaacttcttatagggggcatgggtggatagaagcttgatgaaagagaccccatctctgtgtcaaagacaagtttttcaacaaaaattaatttttgtttttcactaaaatctctgggtacacaccttagatttctgttactaagatttctctataaagactttgctgggagccatgacacactgtgtacttcaacactgtcagagaaaggagcctgagatgtgattcaaaaaaaaagaatttggatagcatgtatcaggcactgagatctaatactagtactgaaaaagaaggaccaaatcacattatgacaattaagtgttttctttgtcattaaacaataaattgtttctcttcaaacacattttatagatagcagagatgtttaggaaaaccatgcattactttatgagttacaaaaagaataggaatgatattattgcctaaatattcaaagacatattatatgataaaaatcctgaaaaaaacagaatataggttacatataaaggctattaatatcaaaccgatggtcaaaattttactaaaaggtaaaaaatgaagttatttctaataagataaggcatcagtcaaggttgtcatactctcaacacttttgcaattgaaaatttaaagtccttcctataattctgtattttaagactccctacaatatttcaaggtcttagaagttataaatactttggacatgaaattgcataaagaatctacaaaagttagtaactttttgtgtataccaataatgaacaagctgcaaaagacaccaagaaaaaaatccatttaaaaaatatggaaattaacctggccaaagaagtaaaggcacctataatgaatgcttgaacacttaaaaaataagttatttgggaatttcccaaatgaagaaattcacaaatcctgggtttgaagatctctacacaattaaaaggaaagatattttaaaacttcttccagccttcagtgtctgcaactctgcacggtcctgcctagagtgaggtatggcactagggaaatgttcagggatctgcagggatgaaccgccatatgtatataggcagtagtggagaagctgcctttgatgcccttccactatagtgagattgatgactaccatggttgccatcctagagccatcatccagtaacttatcaaagaatcaggcacccacagctaaacactgagccatactcctggaatccaattgtagagagggaggagagatgagaaaagaagctaagaccatgccagaaaaaacccacagaaacagttgacctgacctagtgagggcacagagaccctagtcctaaatctggggaatcagcattggaccgaaccaagccctctgaatgtgggtgacagctaggaggcctgggcagtctaaggacctctaacagtggagccagtgttcatccctagtgcacaaatggaactttgggatcccattccctatggagggatagtattgcatcccgcatacacgaaagagggcctagcctccccgctaaataaaatgatttgacagactttgatgatccctcatggaaagcctcattatccttagagagtggctgggggtgggttgggaatggatggatgggaggaagtggaaattgggattgatatgtaaaataagattttttaaaaaacttcattgaatattgtcatcattacagcaggtaaataggaaaaagggaattgtcattaggtgctagagagagaaaaacacacacggtaaaaataacattaccgggaataagacaaaaatctacagagagcacagtggtacctttaaaaggctgttgtgatataaatactactcctgtttgtagacccagataaaccaccattttaattacactgaaacaaaggtgcaaacattagtaatcattccttcaagtctcagcactcactgtatgtgtgcatactattcctttgtatttaaagagtctgaagtctttgtaaagaagcttactttgattgcaaaatgatggtcattccatgatttggccagaactaaatttctcaggaataaattgatgaggagctttcataaataaatgatagccaagtcataatttagattccagagatttctcaagctgagatgtagctttctggagtcccacataattccaatgatattactcagacaactgcttggctattcaaactagtttcatgtaaaccttgaaatatttggcaccagttttagtacagaaataaattactatataatgtagcagtgattggattccttcctgtctgattgttctacacctataatgattaatgttttcattaacaataaactatgtcagcttaaacaaagattaagtgcttatcataaaaatattttcttccagaaaccaaagtctttcctaaagatgtcttataaggttatttttaaattttgactttgttttattcagttttgtggaattaaaatttttcagtgatttaatatttatgctaatactatgtcaaaatgtctttcaagattcctgacattatttgataagtaatatttttattttttaaatcttcaagcatcattctattatttcttaatttttatcaattttaacctttagcttctttacatataattttatataaacttttaaaattcatatattttcatattttatctttacatagtggatttgttttctcttgtgtgggactcatactatttattgcatttactctagattttttcatgaagaaaattcacatctatttcaggagagttcatcacatatttatgtcttgtaattaatatttttagagaaaacatatctagcaactcactttgtattttaatgaataaagttcaggtattatattgatatgacagattttttccagatatattcctgccttgatattttgtctagtgaatgactcaggttctctatatcactactgacccagggacttgttaccattatcaaagctagacagagaaatattcttgatctacaaaagatgttcttaggtggacaggcatggacctatctgaaaatttttgatggaaaactcagcaacatgaagatgcagacaaaatatgatggtggttgtcttagagttgacaggcaaagatacagcatgaaccaattctctgttgtgttttactacatgtaaaacaaacatttgaaaatttatttgcatgcagtagaacaaaaattgtgcttaatatttcagatatctcatcacattaaatttcaggccaactacaaaaagtaaatatttctattgctccctgtttgtaagagttttttggtattaactactatgttaatatagttgaaagagatttcatgttgaagactaaatgatgtaattttgttatgattataaggcagccactgatgttttcttgatattttctttcttgtgtagattccatagagaaagtactgtggactaataatctatttttttcaaggctgacaatcacttttgtgaggttttctttgaaaaatgaaaatactctttgtcagtttgtaacactagatctgaatctcctagatggatgtcagttgatctcacctctaattacattttgtccaacaggcagtgggttcaatgatgctatgtatccctgtgatacattttcatcactggagattctcccttgaatagtgagcatcttgatatttattgtcattgttggtttaactcaactcattgtattcccaatgttcttaagtatgggaagtttcagtattcaaggtataagatatgtttagagatatgttctgggtaaaaatcaatgaatcatgaaaaagtacacaatttacagttcagtagtgtacatgaaaaacaaggatattatccagtaataccagagttttccctgcttcatgagcatagaataatcagtctcagagttctgtgatcattaccatggaatcccacttggtgtttacacattcatgaggttttagttatgcttcctctcactcaaatgctcatttaatcccttttataattattaaccaattagataattatttgttacttaattttaattctttattcaatattcatttaataattcctataaaaacaagcttggtagatgaaaagagagcatttaatagagagccatctctatcaggaatgcatcattccctctggatatcagttctagtgatcataattaatgtacctccatattaactctggtattaaattccctcatcaaccattctctcttcagcccaccaaaaagaatatccaattactagtgttctagtgtttgatatttttatatatctcaaagtataatttagtagtgaagagaaaaactcattgtcactttacttttttgttctttttgctttgtacttgctttttgcattgtattttcttttattttttctccatttttacttacattagaaacaagattattttacatgtcaatcccagttccctctccctcccttcttctcctgccccccccaataacaccctacccatatcataccatttctgctccccagggagaatgaggtcttctgtggggaggggtcttcaaattctgtcatatcctttgggatacggtctaggccctctcccttgtgtctgggctgaggaagtatccctctatgtgaaatgggctcccaaaatccattactatgctagggataagtactgatctactactagaggccccatagatttctgaggcctcctcactgacacccacattcatggggtctggatcagttccacactggtttaccagtgatcagtctgggggccaagagctcccccttgttcaggtcagctgtttctgtgggttttaccagcctggtcttgactcctttgctcatcactcctcctctgcaactgaattccagttcagttcagtgtttagctgtggatatctgcttcttcttccatctgctgttcatccttatagattctgttcccatgagtaatccatatataaacttcccattgtctagattcagtaggattatttatggaaaaactacagaaacatagtgatggaaagcatttctatgcaaggaatagatattttagaagtaatattttgtttgctatttgttcccttaatcttttatcgtttcatagatgtgttccttaagaaaaatactacataaatggtcagaggattcatattttgctacttagagctacagtttgttcatatgaaagcaataaagatggacattgaacttctttacttccacagatggttaacatatcagtagagttcattttttttccattaaataaggtgtattatttttaattataacacatgtattctgtataaaatagatgttgaaacattaatcagcagcaaatactgtgaggaacatatggcttttgtatcactgcataagatctggaaaatggattttacatgtcagatatatccctcaccaccttaaagatatacaatgaacttccagtctgacctagacacacccatctcttttctctaattaattagaaacgttagttggttcttattccctttaaatattagcatttataggatattgcatggtatcatcgtatacttcagcaggacaaaatgagctcaaagttgttgcacaaatatatacctgctttctttctatgccacatttttcacataaattgatgtttttacttattcaccataacccatgtctgtttgatttgtgttttgggagaacagagaagaaaattgctattatacttccatagagacctggtgctcttcagcaaggcatatcacatgctatatctggtttatttacctccatagtggctccaatgacagattattgctactggttactgtatgaaagcccctccacccaagagaattctctgactctggaatgttgggacatactaactctcagccatgaacatcattcttattcaaagaaggagaagatatataaggatagccaagctgaatgtgattattctccacctcatagatcccagccacatgctttattttagtctttgtatcatattatcaccttctaaacggggttttctaatcctgagtgtcaatatatgaacaatgtaagccagtgaggtatggtggaaaaggcaatgaaacagaaaggagaaaataacacacagtatgtctacaatatgtctattcaagttgtgtcattatattctattttgtactcttggaaaataaaaatggcttgattttgttctccttacaattctaaattgctaccactacatattttaatacttatcactattctaggaacagactagtgtacaaaaagaatagagtatgaaaattttcatgcccagagacttgtcctggcatccacatttaggaaactattgtgaggaatggttttatttcctgcctgcacaaactctgctgtagaacagaatcctgtcttgtgcttttgccagtatgttgagctccacacagtctcagaagaataggggttggagaatagaaatctctggaggaatgtgatcccctattggcgatttatcatgagtttaatggagacatcaagaagttttgaatttttgtggaggatatgagggaatagatgtgcagaaagaggtaattataattattaagttagatgaggaaaatataaatcccactagaattttagggtggggtacccacccaggatttttgctttgacacatggttttacagcaagttttcttacttctagttggattttattaaaaatcctattgtcttagcaccacagttttcttctaaggtttttcattttaaatttttttataaatttattacccacaactaagcactgaaccatactactagaatccaattgtagagagggaggagggatgagcaaagaagccaagacagggctggagaaacctgcagaaacagtggacctgacctactgatagcatggagaccttagtcataaagctggggaaacaacattggaccaaaccaagccctctgaatgtgggtactagctaggaggccaagacagtctatggaaccttaaacagtggagccagtctttatccctaaagcacaaatggactttgggagcccattccctatggaaggatactattgcagcccagatacagcaaggagggcttaggccctccaccaaatgatatgatggactttaaaggtcccctgtggagggcctcacgatccctggggagaagtaggggtggattgggaggggttggtggggaacatgggagtatgggagggcaagggattgggggggatgtatatgtaaatatgagtagtaattaaagaatttaaaaaattatcagcatatagcaaatatacatgtattatatataatatattctcacatatataaatggtgcaataaccattgtgtaaaccagggaaaattatcattttgcatatttttagcattatgtgtcaatgtgagaacatccaaagttttcttttggagttatttaaaaaaaaaatcactgtttctcttagctaaagtgatctttttgtagtatgtttgaaacaaataagtagtactaagcgatttttttctctttaaaatcagaagctacacttgtaaagtcttaccatgactgtctaaatatgagataaacaaaaacaacaacaatagcataccaaggtgaaaatatcaaagatcatgagatctcaaaccttacccaaaacattatatgtaactaaaggatgttgcagaaagggtaggctttttcagggaaaagcacaccaactagtcatccaatactaaatcaccaggcctgaaaacatatacacaagtaaaattaaagtgaccaggtttaatatatatatatatattcaatgaaaaggagactgtgaatttgaaagataacaaagaggagtatatgcatgatgcctggtccaagcactgagaataagagaaacaactgagtcttcaagccaaaatgcaacatttgtttgaatcccaccaccactacctaggctcagggaacagtgttgaagaggagctataaagaatgtaagggcatccaggtggtggtacacacactttaatcccaacacttgagaggcaggggcaagtgaatctctgtgaattcaaggctagccttgtctacaaagggagttccaggatagccagggctatctattacacagaatatccctcaataaaccaaaaaagagtgtaagagccagaggatgggaaggagagctattaaattacatcttctggatgtgacatgacatgacatgactaatgtaacatgattttagtaatgactgtagctacactcacaaaatctgtataaaaccaagtgagccaaaaatgccagagagatttctgggatggtctcaaagcttcacctttcactaggagctatttgaatttgatggttgttggagatgggagaatcattattttttgacaaggtgaaaactataaatattccaagtctccagggtatagctccacacccatacatatagttccctgaacatagtgggttatcaaaaagagtaatagagtttggagggagtgtgttgaggaaatcatgggaaaagctggagggggaactagaggatagatgtgtagattataatacttcattgtatacatgcattaaattctttaaaaattaaaataaacaattccaatagctataagtgggttaaacttatcacaaatgtatttaagtgattgtcaaataaaagatgaggaggcaaataatgtaagtaaatataaaatttctatgtgctttagaacatgttagtcatgattaaatcactcataaagctataaatcaaattttcatttacaaatcattttactgagcatcaaaataattctagggatcatgatgtgactcttgatagaatatttgtctagtgtttgcaatactctaatttcagtcttacacacacacacacacacatacacacatacacacaaacacacacagcaatataacaagtcccttttgtatgggtggatgcaccatatataagaaactttctctagattaacagaaccagtcgaatacaccaagatatataagaaatgtactgtgaggaatggggtatgagattctgaagaccaagaagtcccaagacctacaatgttgaagttggggcatcagagagccaaccatacacttccaggccaattaaaacctcaaaacaacaacaaaaatgataactcagtcagaaagttgatttccagttcaagtctgaaggcctgagaactgagaataccattgattcagaaaagagggcaatggattgccaagttcatcttttctttgcttatttgttcaatcagaccctaaatggtttggaggatgtcttcctatctttaacttggcaatatttgctatatggtaatccagataactagatagaacattacaaaggcccaaatatgtataacaaattgtctagcccaggtgataaacaaacttaacaattaaggtgataaaaattatagaatctagacaattcttcagaggtttaaattctacctaggtgaatataagtgaaaaaagacatggtacataatgaacaacctgaaatacagaaggaaaaatcaatagaaatcacaaaatgttaattataatgttgtaacattttgatagctaacataactattaactagacaacaatttgctcagactgatatttaacttggcaccaccctaactcatcctcccaaaagctggtattaaaagtacgtgccttacatctgacaacagcaagcctttactataatgagcctaatatcaagcttttcttcagaaagaaatgcaatggttttatgtttttaaatgactgaattccataaatgccaactcatatttcttaaccaagataaaataccaatcaaattttagtgctaagtcaggacattataagatacagaaaaattgctttagtgtgcagaggaatatgtgcataatgaaagtgatgcatcacagagaggtgatacaattcatattttgtgagaaaatggagtacaaatataaagaaaaaattctcaatagtgtaggtagatatttctttaccaccaacaggtccaaatagccacacagaggcttatgttaattacaaattcttaattggtagcttagacttgttacgagctaactcttacactcaaatcaaccacgtaattcttatctatatttagtcacatttttggtaccttttatcagtatagaattctcatcttgtttttctgtgtttgctggtaactctcttactccactcttcctcttcccagaattctcctagtctggtttgtttgctcagtctcttcatagccagatatcagtcaatcaggttttttaagccaatgagaataatgcatattcatagagtacaaaagattgttctgcagcacaatagaattaactccaaaggattaaaaatacttagagaaatgttgcaaatctttaaccattagggaaatgtaaaccaaaactactttgagtttcaatctaacaagtgtcagaattctaagatcaaaaactcaacagactggtcatggcaaggatatggaataaacggaacattcatcattgctggtgggagtgcaaatttgtatagccaccatggaaatcagtatggtggctcctaagaatgataggaatttatctacctcaagattgaaccatacccctttggggcatatgcccaaaagacacttcatcctaccacaatgacactttttaaatcatattcatttcttctctatttacaatagcaagaaaacaagttgttacttaacagaagaatggaaaaagaaaatgtacatacacaaggtggagttcagcctagccattaaaatcatgaaatcatgaaactcacatataaatgaatagaactatagaaaagtttttctggatgagttaaacagactaataaaaacaagcacagtatgtatttcttatatgcagatattagctgttaaggtatgggtaagcaagatacaatctgtagaagcatagaagtaagatatagttatagattggaggtgagcaatatatcttctagggagggtaaaatggaatagatagttacagatggacaatgattaagtaatgtattgggaatatcaagcagggggatggagggaagatggggatgaaggaaggaatatgaggatggacagtaaaaattgagggccttttgagggctagtatataaacctaatacagtagaagcatttcaaaatatataaatatatgaaggcaatataaatgagatcaccaaataacaggagaaagagcctcaacttgatatctcttgtcaccaaattgagattcaatagcaggaatgcattacatctaattgggttgttggtcaatgggggtctcatcagaactcccaaatagcccaggatattgacaatgatacaggtttctttccacaaactaacaacaaggccctttgttgaaaacaacgtcaagtaactaactgattgatcaaggagaagtctacctaacatagaaactttaccccttctatctagtgtttttggtaccagaaggtactcttcatgctaccaaagaagaaaagtaacacaaatccatctataaaacctttgaactaaaattgtttcctacctgtaagatacagaaagtgcaatgttggcacaaagattctcacagtaatcaatatctaatttgtacctgcattaataatgttctgtttagaaagtcttctcctattccagtgagctcaagactattccttactttttcttctatcaggttcagtgcagtcagttttatgttgagatcttaaatccatttggagttttgtgcatgatatgtatggatctatttgaattcttttatgtgcagccatccagtttgaacgtcacatttgttgaagatactgattttttctgtttgaatttcttaattctttattaaaactaaggtgttcacaagtgtgtagatttatgtctttgtattcaattcaattccatccataaatgtgtctgtttttataccaatattatgcagctttattactatagctttgtactagagcttgaaattaggaatggtgaaacctccaacagttcttttattgttcgggattgttttagataccctgggtttttattttccatcttaagctgagttttatcctttcaagatctgtaaagaactgtgtgtaaattttaatgtggattgcattgaatgtgtagattacttttggcaggatggtcattttattatgctaatatcatagatccatgaacatgggtaattttttagtttgatatatattattttgttatatcttgttgctacctctcagaagcttgttcttttctaatgagaaactgaaaagaaatggttctggatggtggtagaggtgggaaagagctgggaggatttagaggaaggggaattgtaatcaagatatattatataagaaaataatctttgtaaaatttcaataaagtatagatagtagggcaaaacaaaacaaatgaaaaataagtgataaatactaaatgattgggatactatgttaagtgctggtatcataacatgacatgataccagggcacattcttctttagtcatatgaggacaccaagaaaaggtagatgcttcagcacttggaaatatctaaccagacacccaccaatatgtcaaccatgggattttattgttctacatttatttgtccaatgactgcctttgccatcctctgcataatccagagggaaggggcattctgtttgtattaggcttagaaaaaacattatttctaggaataccctgcctacaattcctttttaattgaacttgtttgtcacaattgaaacatttgatgttttgatttttcttcagtcctctggaaatcacctctcctatccatgcatcatcatggtcacgagatttaatattggttgcattttgtatccattcctacaagggtactgatcttgcctttaatggcctaaattatcttttgcattgagaattagcattttaaaaagccagagattcaattattatatgtctagcttctgaatctggtgtcatgctattaactgctgatgtcattctttggaaaaagtctgtgaagtcttcctttgggccatgtaaatgactcagttttctttcctacttctccaattctgtcccaagcattaaaagttgctgtgtggtataaactgagggtgtggtcatcgtatagaatttgtctttgtgcatcagcacaatctccctctccaagaagttggtcttcagagacatccatacctctaggtctacttcattgttcagtggtcttagcttcatcttcccccaagtcttccattttaattgagtaccatggctctgaaacagctttatccctgtttctccagtctctagggatagttgtattacaactataccatgggtttaacatctgcttcacaaatggtgaatgcatgccataaaagagtatcacttccttgaatatccttaaatctagcgtttcaacaggagtccatttgactctgccttggggatatttgtcatttggcagttcctctaaggtgactggataaattaaagctggttgttgcagaacctaatgctgtacctttctaacctaataatgcaatgctaaaatcagttctccattcaattcctttgtctgggtctgaatatctctataatatgttttattaagttttcctaaaacttgtatcttagcactcgtattaatcaaaaaataataaaactgataatgtttataattgacattacataaatcccatctaaattagctatcctctcatttaattgttccattttcaaacaatcctgcatattttctaggtgccaatatgtaacacaagttataataggtcttaatactaagagctcagagtcatatattaggggctaaaaatggatagattagagaaacagtgcagccagccactagagacacctttacctctactgaatcctcagactgcagggatgatcctgtctccacaaatccccagagtgaaagctcagactgtctgcctcagagtgactacctagtcactctagactggctagattgtaatgagcctcccaccttatattcctctcctcaccaatcctatccattcctatctctacctccttagttctgggattaaaggcatgtgactcaaagttctggaagcacctttttgtgggctctgcttctctttaagactggatcaatttcatgtatcccaggattgtcatgaattaacagagatccgtctgcctctgtcttctaagtgctgggattaaaggtgtgtgccaccattgcctggcctctatggctaactagtgtggctagttttctcctgtggtcttcaggaaagctttatttgttaagtcataaacaaaatatcaccacagtcattcatcagtaattgagttcgtccagtatatatctgagaacccaaaaccttttgttgctaatccctaaacagactttacccaattagacacagacactggtatcaatagcagttgagcaatactgtcctttttctatagccagaatcaaatgggtacagatgctataactttaatcttacttatataatccaatctataactcctgaaaaatctgtgagcttttcatgatcacattacttctgtctgttatcaatccacacaatccttgtggcaaaggcccaaatataaaagtagatacagattggactcacatttttgtggtagtataaatacgaagattgcatgatgtcatgtctggcactacctgaacttgcctagaaagttttaatacatgggaatcttgggcactataaaggtttgactgattgacatttggtctcttccctagaaatctaccttttttccctctatgaagtcttttaactagacccttccctttcaacaccagtgagttgaagtgtagaaactttttatcattctcttaccaaagataacttgcaatacctaaaaaatgaaaagagtttttaaaaagatgtagtaaagtttcagctgcatttacttcaggaaatcttcactttccacataggctacagtttcaggtgtggggactgtgaataggggaagaaagaatagttacgtttttacttccctcagtttttgtaccatcagctgcttcgtattaaatgtattgtactcggatatatcatgtctaggatgacttctcacattgttgctctaggtgtattaggaaaaggatctttaaactttagggaaattcaggttttagaatattgagtaaaggatcttgaggatttctaattttaatttgtctgaactatgctctcttcacatttaatgtaagaaatgatggacctcttctattaaacaatagccaagattaaaatcacctttcccttattagactatacacatatggccatgattaagacttttttcatgctcccatgtctgtctctcttatgatcctacttgtttcctaccttctctggcagttggattataagctggtaatcctttgctctatgtctaaaatctatatacaagtgagtacataccatggttttctttttgtgactgagttacctcactcagaatggtttcttctagtcccatccattttcctgcaaatttcataattccattgtttttccccacagattagtactccattgtgtaaatgaaccacattttctctatccattcttcagttaaggggcaactaggttgcttctaggttctggctattacaaataatgctgttatgaacattattgaacagatgtccttgttgtgtgaatgtacttcttttgggtatatgcctaagagtagaattgctagaacttgtggtagactgattcccattttcccaaggaatcgccagactgatttctaaagtggctgtatgagttggccctcctaccagcagtggagaagtgttcccctttctccacatcctctccagcataaactgtcattagtgtttttgattttagccattctgacaggagtaagatggtatcttagaattgtttttatttgcattcccctaatggctaaggatgttgagcactttcctatgtgtctttcagccatcttaaattcctctactgagaattttctatttagatctgtaccccactttttaattggattatttggtgttttggaaactagcttcttgagttctttgtaaattttggagatcagccctctgttggatgtgaggttggcttcagtattaggcattacagtgtattgggcaatattgaattttaaaattggagtgcctaatttctataataaattactgtaggggaagctatagccacgccttcttaggggctggctacaggtgtgcctgaccaggcttgtgagggcgtggtcagagtgacgtagtgggactgtgttttcggtttcggttgctctttgcttcttgctgtacagactgttgctgtgccggctggctaggtcgctctgtaagtaaggcttttccctattaaatacccttatatttctacctgactccgtattggtaatttcccactataaattaccaaaattatctgttcatactcagaatccaaaaggaatgaatatgaggcctcatctattgtatatacagacaaattaaaaatcaagaaataaatgtatttaaatatatatatatatatatatatatatatgtagagagagagagagagaccataacttgaagttttacatcattttcaaatatgttacagtaaattcactaatcccagtgaagttaatgcttttccagaaactttcttgaatgcaatcttgacttctttattcctaaggctataaacaagagggttcagcatggggatgaccatagtatagaatacagatgccaatttgtcagtgtccatagaatgactggagctgggctgtaagtacatgaagataattgtgccatagaagatggaaacagtggtgaggtgggatgcacaggtagagatggccttctttcagccctcagcagaatgcatcctcagaattgcaacaaaaataaataggtaagaggtaaagataaccaataaagtaaaagtgacattgaatgctgctaacaggaacagcacaatttcatttgtgtagataccagagcaagaaagagcaagtagaggaggaatatcacagaaaaagtgattcaccacattggaatgacagaaggaaagttggaaagtgagggacacatggatggaggattgcaagattccatttatgtaagaaccagcaacaagcagagtacacattgtagtagtcatagtggtggagtaatgcaagggtttgcacactgctgcatgacggtcaaaggccattgatgccaggatgaaactttcaatagtagcaaaggctgcaaaaaagaacatctgggcagcacatgcattataagatatgatcctatttcctatgagaaacccatctattaccttgggagtgacagctgaagcataaacacagtccacaaaggagagattactgagaaaaaagtacatgggcgtatggagttgtgagtccagcagaatcaacaccaacattccaagattccaaatcagtgtgatcaaataaatgaaagtaaagatgacaaacaaagggacctgtagctctggggtatctgttaaccccagtagaataaattccatcacttctgagatattctgcatcagtgctatttgggaattatgacaggttcctaggatgagaagaagaaatgaaaaagtattttatttgaacctcaacatgatattttaagtataatccagttctcatactcagatgacagcatcctgtccattgtgatggagcccacattgaattttgggtagaaagttggtaaatggagccattatctgggactgacatgacaatggaagcaaatagaaactttcacttatttgctcccaatagggatccttatggcttattcggattttctagtaaatgataatacttaattcagtaaaccaaaaaggacatgttatttgcaataatttacaaacatacctgcctaaaaggtacataaatgtcttactctgaagcattaacaaaataggaaaatgcaattaatatatgttagtaccaaagcatatctaattcatttcccatgtctgatacttgtaccattttcaatggcctagctgtgcctatgcactgattcatagtattgttccatagatacgcagatttatatctaatttaataaggtgtttccttaatttttaaaaattttggactgaataataactgcttgatatatgggacatattctttgtgaagtttagaaatttagccacacgtggaaatctaaatacacagttctttcaaaaagttgaaataattttaacttctttccttaaatgtaatgggcctattttgcctagagtaaacaatttcctattaccatcatggaagcttttatatttgtgtttgatggagaataggataaaagtcaattaggagtttctttttctttctctacataatctgcaacctcaaacatgatgtatgccatggtgtatcttgttgtactatttgtatattctatcaaataaatcttgactatacagctgtggttaaatatgagcctgcctcttaacttgagagcagtttccaactttggaatcttgggcatattcatccctctacattgatatcattttatattcaaggcaccaggtgttatacagatgttataatcttatctttaaatgaccagcgtgaagtcatcattttcacagaatatatctgcactaacattacaaggaataggtaagttcttccaagttacaaaagtcatgaaactattaacatttcaaaatcattcaaatcataatcattaccttccatgcccttgctcatcttttctccatttcttcagaatgttcagctcatgatattaatgtctacagattaatataggaaaatgcacccagtaattgatatttttaaattgaggttgaaagtcacataatcttctgtaattaaaaagtaactattcagtggacttttaatactgtacaaaattatacacattagtaaattacaaaatagtctccttctggaatgaaaccatcactccaagatctaaagatccttagagtgcagactggctacttttgagcagcatagcctttaaaagtacactgggtaaagagtgagaatattattgatcataattggtatgtggctctgctccttcacttttctcaacattatcttcacttttttgcactggtgaaacaaaattgactgggtattttaatagcatttatagttaagactacctacactcaaatatttttaatacttactgtcttgctatgagcagaccaatatgagtaaaatggagaggtgtgaaatatttcatgtccagagcattgacctaacatccatatctagaaaaccatcttgctgctcttgttttccatggaatagaatctggtcttgtagtattaccaatatcacagcagaaaaagcaagctgtacatgtatctaaggggcagcagtgcatgtaaatgatgtctctggagacttatcaatctacactggatttcagcccgatcttgctaatgataacagaggatagtgctttccctttttctaatatcacttatgaagacattggggaatggaaacatagagcaaggagaagagcctccatttatcaatcacagttattccataaccatgttggagaaaaggaaccaaacaagcaaacaaaaaacttgaaagcctcattaaatttctacttaaacattttcaacaacttatttaagtgttgtgatagtatattttctcaaaagttaagagatggccatgggatattttattatttcattttaagctttgtaaagaagaaactcatttttcttagcacaatgtccatcatctagatgtatgtttttcttctttatttaaaatttgaggcatcccatgttattctcaagggcctatccacaagattgcttccaacatccccaatgagactatctctgtaacactctagatatagtctaggtctacaaataatgcccctgtatattctgttcaaccaaatctgctctgcaactaaagtctaggcttctactaggaccagaacccaccctatctgcatcgacttgcaggtaaatttgaaaattcatccagcaaatctacacaccaaacttctcacttgcttatacaaagactagtcaggtgactctccctcacttacctattcacacgttctccaaaaataaggctgtgttacgccacataatgtcaagcctaatgtgtcctcatttcctgcacccacaaaatatctctggaactacactaggatattctttagatatcccctaacctacaggaacctcctataccatgtacacacacacacacacacacacacacacacacacacacacacacacacacacactgtggtgtgtgtccctttacttcaggcttggacagtagaacaactcatgaacatcatgtcagtcccttctgtccccttgaatttattccacccaagatgttttcaacttctaggctctcaacctgctcaataatcctacattctgccctaatatgttctgaccatatcaaaagtataaataaataaaaaatccacatgcccaaatatcattgtaaatataccaacaacatgaaagatcaagccagtatttttcaacacacctatttatatgtagaaataattaccaatgggcatttcctacatgagccccaggactaataacatacaagataaaccataaacttcattaaagaattcagggagtttaaggaagacacagaaaaataggtgaatgttttggttgtgagcctagcctttaactgctgagctatacctccaggcagctgacctgtacaagggcgagcaatggaccccagaatgatgtctgggaggccagcacaggacagatccagatccctgaacatggatgtcaatgaggaggccacttgcatttcatcttttttttttattttttttcgagacagggtttctctatgtagctttggagcctatcatggcactcgctctggagatcaggctggcctctaactcatagagatccacctgcctctgcctcctgagggcttggtattaaaggtgtgcacgaccaacacccggctgcatttcatcttttgagcattctagtttcatgagattaaactgggtaggagcagccagtttgttcttatggaaatgctacaaacttctttgttgggagtagttgacacaagtgtgccacttcataattgtggggcacaataccatatgcctgaaatttagaacagtatagtctgttctaagctaaagtgtataactatttgtaatagcaacaaacatttttgtttaagattaatgttgaaaaattagccagcagacatcactgtgaggaacacgtcatcaatatttactattttctcacaattttgaaaaattatttccattctccaatatatcctctaccacttttaatatatctagtgatctgtgacccttcactagggataattccatctaattaatttttccataattattgagcctctttgttgggtcatatccttcaaatatgtgcacctttagaaaactgtatattctatgtcacaattcttaatttaagtgttaatatatgcaaacatttcaaaataaaggagtaagttgagtaagatggtatttaagtaactggatttggtgctacatggtgaaagaaaaggactgattagcatatcattgtagtgagatatttacctcacacctgtagtgctaaccatgcacatttcggcatggtcacaggtgcagatgtaactggttaaaaggaatgaactgaggctcagaatgccccttctgggtgtggagagctttaggatggcagggtctgcatccttgggactggagcgacagtcacttgtttcccatgtaaattcattttcacccaataacatgttccccttccccatatgcttaattattaatgttaaaccttctgtgttgatgtcaatgtttaagtcttccacagtaaccaaaaaaaaaaaaaaaccctcaaaacagcaatctttgaattctccagaaagaagatggggccccacttcatcaattccactggattcaacttgatgtctttgaactagcaaacaccaccctaaaaccagtttaggactatactgctctagacaattccagaggagctagctgaaacggtgcacctcctcattataccctggccagatattcagataagaacttcagtcaaacatcaagaacattgtcctaatgtccacaccctggaaataatcttggtgtgtagtcttctgtatctgcaactctgctgtgaaatagcatctgggcttgtgctgaaaaacttcaagttagaggtcacaagcttagcaaatgtctagaggagctgtgccattcgattttgtatctttagaggcctatgatccaagcaaacacttcagagggatggtacaattttgtctgagagattatgaggatattgagggatagcagctcagggaatagaacctgcaattatcagttcagctgaactgcagccaatgtaggcagaaaaataacaaaacaaacatcattgaagtctcagtgcacatcatagaactcttgtctgcatttattactactatatttttcattactcaaaactaatttcaaattcaaatatatgtcatcatattcttcccctcccctaaaatcgagcttcacataaataccttcatatgatctcactttgatttctttccaccttaacccaccttcgatttacttaaataatacaagataccttataattaaagtgcaggagtgagttataggcatgatcatcctacagagtgagagtttcatctgcccttgtaaatatctaaatgtagctatacacaaaatcatatttggactaaaactgatattaaattactttctgaatttttgttttcttaattcaaatgtatagttcttgacattgaacgctgtaggtagaaacatggtctcaaaatttcaaaaagatcatgatcaagttcatgatatagcatcacttcatttatgaagaacctacataaaattcttattagggtagattggatgaggtaattaatgtgggaatagtatcagcagtaaaaaagaatacagtgatatcttgaaatttgcaagcagatggatggaactagaacaaaacaatcctgagtgaaataacccagagcacaaaagacaaacatggtatgtactcactcacaagtgaatattgggcataaagtaaagaataacaagactataatccataaccccaaagaatctagttaacaaggagaaccttaaaattgtcatgcatggatcccctggaaaggcaaaatagacaatatttcctacgaaaattgggagtgtcgagggaagaaaggcgggttgaagggatgggggagtggagacagggagggggaggagaccttgagggaatgggatggtcaagatgggagaagaatagagagtgagagcaaggaaagggatatcatgattgagggagtcattacggggttagtgagaaacctggcactagagaaattcccaggaaaccacaaggatgaccccagctaagaacctaaacatcaatagaatgggtgcctgagctgggcttctctggtaatgtttgatgaatgcctgtatagttatcatagaatcttcatccagtaactgatgaaaacagatacagagatctaccgctaagaattgggccaacctcccagagtccagttgaaaagaggaaggagtgatagcacgagcaaaggtgtcaagaccaatttgggaatactcacagaaacagatgacctaagctagtgggagctcactgactccaaactgatagtggggggacctgcatatgatcaaactaagctatctgaatgtgggcgacagtagtgtggcttagagatgctgtgaggaacctgagagtggggccgggatttatctgaactggtgcttgaactggctttgtggagccgtctctttggaggaataccatgctcggacaagatataggagcgagggtcttgttcctgtctcaaaataaggtgccagagtttattgactctgcatgggaagccgtaccctctctgagaagtagatgggtgtgggtgaggcaaaggaggggtagcaggaggagggtaggaagtagaaactgattggtatataaaatgagaaaagattgtttttaaaatagaaaagattaaaaagtataggattagtataaacagacattggaaatttatatttaagtctcatttcaaattgtctggtatttgatattatttattatagtaattcacctcaatatcattttatttacattttcaatgtcttacaagaacacttaaggcatactttgatccctttagtatacatcaaaattttattcagaaaaaagtaaagtgtatgctttgcaataccatggtggtaaaaaccctaaaacacatttcttgttcttgacacttgtaccaacttatacatagtataatgtcttgaatacacactcttcctcatctatgaattctttaagcacaatttcagtttaaaatatgggccatttggagtatcttcttgatacatgagacctgtacatggtgatatttggatttatttaaacgtgtcaaaattaaagacagttttacaaaacacaaacattactttgtttccttccatgtcatgattatttttcatgtaggctggcattttccatcttttgtcatcatacatgtctgctttacttgttttgggagcataatagaggaagcatgaagagttgcttttcttcttcccatggattttgtgccctcaaccaagcaatatttcctaatgtatatggttattctcatttccatgtctcaggtgacacctgcttattattttttattatactatgaagttctcttctaagctcaacaatccttctagtctagagtattaggtctttattttaagggcattctaaatgagaatcattattccttttatttgcatattgtatctgcacctaaatagcaaataatattaaagcactttgcaagttataaaagacactatagtttttttttaaaaaagcaatgggagctactactttacatagtctatctcatttcaacctggatacactatttctgctcagttcacaatatacatgcctaactattggtgggccaaatgaaaatcacataatcctttattaagtcaaatggttgttggaagatctacagtctgtgaaattccaaagagtcttattatcattacaacttactcctgaaaagcattctaaatagaagaaaattttgaatatggtgtcaccttttgaacatcactgtctctccagagtcaaatggtcctggtacggaaatttataggcctgaaacaacacaggataacagaaataacatgatttcaggctaagagatttgttagaaataggcaggctgtcatgtggctcacctgattaagctttctgagcattagttttctttcctttgcttcatttgaaaagtatagaagattgtaaattttaccatcctttatagttctaactggctgtgttgtggcgttagtatgctttttaatacttcctagtggcagacaaatatggagacacaagaaaatatgaaaactggcttcatatttagagcaaggggctcaatgttcacatctaggaaagcatcttgctgttatctgcaggattccatgagaatacagcaggtgatgactagtgttaagcaggtcaatccaccaattaatacctctctgatggagaacctccacttggaaatgattatgaggtcactgactgtaaatgaccagttgcttctgtctgtaatttctctcatgtgccactgcatcccttacctaataacagctatgagctttatcccattgttgtgtgtatatcacatgtatatattctatatttgggtacacatatagttgtgcttagtcagaaagattgtttctgcttaagttgtctaatttctttttttaagattgtatttatttattttgtatacaacattctgcttccagaagagggcaccagatctcataacagatggttgtgagcctcaccatgttgttgctgggaattaaactcaggacctttggaaaagcaaccgtaacttctgagccatctctccagtcccaagtagtctaatttcaatgaatagaaataatactaggatatctttcattattcagactgacataggaaagtaaaagtatgcttagtcacaaagacagcttattttagacttcagaaaaattcaaggcaaactagttgctgctggagatgaatatacaaggacaaatttctacatgtttattgctaattcatggtaaagttgaagcaactttggtagctataactcctgcagtaatggactttctgcacatacttccaatctcaagggtcagctgacttaccatttattgcttaaggcctgaatttccatgtcattctctattgggaaccctgaccaactcaaagctatgttcacagccaagtgttactcactggtttgccagggccacttccctagccttagacaaactgtgtaatttgtcatgtcatatcattctacatataaccttctagtaagatggcccattaccatgttcatattctaggcactaattatacccagtccattataacataaaaagatatgaagttaagaggaaaaatgttctggggtaggcctgacaagtttggggaaggagataaggtgttaatgtgatccaggtccattgtattcacataccaaatattcacaaaaaaactaaaaaatgacaattttaggagtaagttttattgtttactcacttttacaattttaatgggaagtttgatatcagtctagtgactacttgtatgtttcttaggtatatttttccagattcctaataatataattaagtacttatcataaaaaatattttcttctcatgaaatgaaatcattcctgtagaggtcttagaggatatctttaaaatttggcattgatttttattcagttttttaaaattctttctcaaaaatttactgaataatgtttcatgtattgataaatattatatggatgagaaagaattttccagagactttttccctgatattttgcctagtgaatgactcggtttccctttattcactacagccccagggtctgtatatggggacaacctacacttgaaactcagatatttcatttatcctttatttgtgagctagaatcatataagccaatacctggtcttccctaacatgttttttcctagggatgtcagaactcatgtatttgttctattcataaagtttagtggataatggtatcagctgtttcaccagtgtgtattttttactctatgcactacatatatttgtaaatttatttccatcccaaataagagggttttcttaaaaatataagacatgggattttataaactgatactcatagcagaattttctgatcactttgtggttgtatttcatactggtgagaggatcaaaaagccttcatcttcatgcacctaaaatatctgaagcagacaaaaatgagatgattctgtatatgaagtatcaatttcaaacatattttaaatgttttagttaacaaatgagacagagaagtacccttggagcagagacagatataatatcctcaggtagataggtagagactgatctgtaaatccctgatgaaaatctcagtaacatgatgactacattatatgccatcctagagccttcatccattggctgatggaagcagacacccacagctcaaccctgaactctggaacccagttgcagagagggaggagtgatgagcaaagaggtcaagactgggatggtgaaacccacagaaactgctgacctgaacaagggggagtgcatggaccccagactaaggtatgggaggccagcatgggactgatccagacccctgaatgtggatgtcagtgaggaggtctcagcattctatggggcctctggtagtacatcagtatttatccctgaagtaaaaaaggactttgggagcccattccatgagtagggatgctctctccacctggacacattgggggagggcgtaagccctgcccaggatgatataacatgccttggggatcccccattgagtgccttatcctccctggcaagcagaagggggatgagtttggtgggggggaaggaggggagggagagagagaagggattgacatgtgaagcaaatttgtttctaatttgaaataattaaaaataatttcttggaaaaaagaaaatgcagaaaaatgctgtggtagtcttgcagtttacaaacaaatgtgaaacacggaccaattctctattatttttattaaaggcaatccaattgttttacatatttctatatagtagatcaaacattgtgcttatttattcagacataccatgtgattaaatgtcagggcaactcaatcaagtaaatacttctaatgctttcgataagaagttgtttttaactattgcattaatatagttggaaaagatattatggagagtcaatggaatatttttcttatgtctataaggtagctattgatgctttcttgctatttgtatttctagtgtgaattcttcagacaaggaattggatactaataatttggctttgccaagactaacaacctcacatttgagtatctttgaaaaataaaaattctctttgtcagtatgtagcacaatacctgaatcccttgatgtatgccaattaacatcacctttagttacattctgtccaacaggaggtggaagttgaaggatgggctgtattcctctactacatttttagcggtagagattcccacaagaacagcaagcatcttgatgcctacagtcatttttttgtttgactcaagctcatcctttcccgctaattctcctaagcatgtaaacagtgtcagggttcaaggaatagtataacaaataaggtctgggtatgattagttaaacttacagttcagtggtgtacaggaagacaggttattttacactaatttcagagttgttgcttccttaagtcatagaataatcagccccagttttctgttatcagtaacaaagagtaacattttgtttaatactattcattaattttgtctcagttacacttcctctcactcacccactcatttactccattttataatcatccataagttaaataattaatttgttacttaattttaattctttgttgaatattcatttaataattataacaaagagcaaaattagtagatgacaagagaatagtagagatcagttagtatcaggaattcacagttacctccaggtatcagttccagtgttcataattactatacttccattttaactctagtatcgagtgtccttctcaaatattctctctgcatcccaccaaaaagaacttttcatttccattgttctttagtttgtgttcatttaactcagtgttacttagtaatgataggaagaattcagtctttttacccttctgatggtttccattcccacatgaaatctagttatgaactttcaattttccaggtaatttacaaaaaatatataaacacaatgatggaaaattttgctgttcactacaggtattagatatgcttaaatattatctagaatgcaggaaatgaataaatacttaagaattgtgttgtttcttaactcaatagtttatcaccattttataagtattttctttaagaagatactactttaatggtgagagaattcatatgctgcaacttagaaatatatgttatgaagtacactaatttacccctgaataatttttgtctgcagtctgtatttgggctctagaattcagtattagtcagatttagtaatatgcttccacacataataaaaaccctatcactgaaattattttaaactcatttcatgattctgtatcaccaaaaaccatctggcactaaattatttggggtgagatcttggaatttttcaggatacaatctcaatataattctttacagcactaatacatgagaacaattaatttgtatcatatataaatattatggagttattttcaaatttaaaattcaatgaaaagggggctatgaattataaagagatcaagcagaagtatatactatgatttgggggaaagaaagttaaaggaaactatttaatcatattctaaaaaataatagtaattaataatgataataaaaccattgaaagtataacttgcacagatgaagatgatctaaaagtatgatatatccatttatgaagtagtattgcatgtgaattctatagcataataatattgatttaaatacaaaattgatttctcatttcttgcaacatacactccaatttgattataaattagtcatataaccaatgcataatgacagattttttttcctttgtaaaataactgtccaaagaaaccataaacaagaaataagtataaagtattcctcaaggatacaggtccaaagtttcacatgctcaaaaaatagataaaactttggagttaattgactaagttcactgaagacttaatttttccaacaactttcatgaatgcatttttgacctctttgtttctcaggctgtagaccacaggatttagcatggggatgaccatggtgtaaaatacagatgcaattttgtctgtctccatggaatgactggagctgggctgtaaatacatgaatatgagtgacccaaaaaagactgatacagtgatgaggtgggatgcacaggtagagaaggctttcttccgtgcactggctgaacgcatcctcaggatggtgatgaaaataagcagataagtgttcaatataactaagagagtgaaaacaacatccaatgtagccaagataaggagggtaatctcatttgtgtaggtgtcagaacaagaaatgttcaacagtggggggatgtcacagaaaaagtgatttattatattagaaagacaaaaggaaagatgaaatgcaaggcctacatggatggaggactgcaagattccacacatataacaggaggtgacaattaggatacaggtggtacttgtcatagtggtagtatagtgcaggggtttacacactgctgcatgacggtcataggccattgaggccagtatcaaactttcaatagcaacaaaagctacaaaaaagaacatctgggcagcacatgcattgtaggatataatcttatttcctgtgagaaacccaaccattacctttggagtgactgctgaagcataaacacagtccaccagggagagattactgaggaaaaagtacatgggagtgtggagtcgggagtccagcacaatcaacattatcatcccaagattcccaaccagtgtgatcaaataaatgagagtgaagacaatagacaaaggtatctgcagttctggaacatctgttagcccaagaagaataaattctgtaacctctgaaatattccccatcagtgtcatttggggatgatcataacaagttcctagacaaataaagaacatactattttaatatctctggaattctaaactgtggccaggtcttttactcatttatttctctagtgaaggacactgtttagaagatggtgagctccattctgggaactgtgggcagtttgatcatatggaagtgatacagatgaacactgaacttctttgctgccaaagatgagtactatatttatgtagctcagttccactaaatacaatggtacatactgcattaaatcatacaacattcattatctttactggcaaattttagatgaatgtttgtatagaatagacattgaaagtataattagcaaaaacactgtgaggaatatatgggcttttgaaatggatttcacatttctagtatatcctccgatatcttaaagatatagagaggtatgaaaatcaagccaaggaatatccagctttactccctaaataattagctctgagtccctttaaatattagcacttgtatacaatcgtgtgctatctatatatttcatcaggacaaactgtaagggaacaatttttcaaaattgatgagcaaaactgtatttcttttttccatgtcaatcttttgcacatagcctggtattttccatcactcaccatcaaccatgtctttatgattttaaggatatgattttaaggataacagtgagaataataagaaaattgttctcattcatcaatagtgacttggtgctttttagcaagtgacaatgtataacatgttttgcttacctccacagtggctccaatgacagatggctgctactgggtaaagtattaaagacgtacctaaaagaaacctctgactctaaaatgttgagactaattctcagcactgaacatccttcttattcaaggtaggagaagatatataaggataaccaagctgactgtgattttcccctatctcacaggttccacctatgaaattcttttgagtatagtcatcattttaccaacttctaaagagaatgttctgatccccagtatcaaaatatgaataatataaaaactgtgtatgaaaaactgaggtatgaaaatcttcatgcccagtatttccctttatccacacccaggaaaacactgtgagaaaggctctcctttcactcctgcaaagctcttctgtggaacagaactggggcctgtacttttaccagtatcaaggtatagattgcaagctccacatatatctcaggggaatcagtgtataaaagtatatatcttgggagactttgatcccatgttggccattccttctgatattaatggagacatcaaaatgttttgaaacttggtggaggatctttatgaagacatgagggaatagttgcttagagtgaagtaactaatcattgggccagttgggctatagtaagtttgaaaataaaaataaaatctcactagaatctctgtgccaggcacccatcctaggcttctgggcttcaccgaatcttttagggatcatttttcttttcctctatttgtttttagtaaaacatccactgtcttagtaccatgggtctattctaagatttttctttttaattttattttataaatttatcagcatgtaacaactatatacattcatcaaattgtatgtaagaatgtgatattttgacacatgtatacattgtgtagtgattaatgtgtaattatggaaattagcataccattatgtttaatatttacttgttgttgtgagaacatacaaagttttgttgtgtagttatttaaaacatacactatattcctcttagccaaatttatcttattttgaactaagattatagttaattggtaacaataagtactttcttctcattaaaatcagaagctacactcaaacagtctcaccatcattgcctaaatatgagctgaacagggaaaacagaaataacataccaatgtaaatgaagaaaaagaccatgagcacccaacccaccacaaagaacattggcaactaaggaatgctgagagtgggttaaaaagtcttgtgcagaaaagcacacaatgccaagccaccatccctgaaaacatatatagatatagatatagatatagatatagatatagatatagatatagatatagatatagatatatagatatatatagaaacaccaatttctatgcatctgtgaatgcacatgttctgggccaggatacatatgaggttggatgcacttggtactgtgctggtaagtcagaagacaacttctactatcaaactcaggaagtccatcacttcctttgagaaaaggaagtatccttctttccttgataaatttaatcaggtgggaaaacaattcaagaggcccaagtttccgtcatatgaattaaatatggtccctagatgttaacccaaactcagtgatttaatttcatatatttttagggagttgatagcaaaagtaatgaagaggtgagaaaggcatcaagaaaagaataggaggaaaattcattcttttactacggagtggcttatctatgtgaacacctggcccttagtctttttttttttggtcttttgacacagggtttctctgtgtagctttgaagcctatcctggcactcgctcgggagaccaggctagcctcaaacccacagagattcacctgcttctgcttcccgagtgctgggattaaaggagtgggccaccaatgcccagcttggcccttagtcttactaggaacctcatatctaatagaaggtgcaacacagtggcatcaactgatagtagcatggagtttgttctccttgaattttatttgataaaagaacaaagaaattgtgattattgatcatgcaaaatttttagttgtacatatttcgttaccagaattcacgaatggaattgaagaaaaaaaaaaagaagttcatgttgaaaattttcctgtagagaaacttctttcttcaatggacaggaacagtcaaaacagatatgcatgcctggttcaagtaatgagaagaagtgactggattttcagactaaatggaatatatatatattaatcctaccaccattacctagacttgatgaatatttttgaagaggagaaaaactataaaagccagaggctgataaggagagctatgaaaccatattttctggatatgacaaggctaatataatcatgaactcagtagccgtgactacctacacaaaacctatacaagataaattttattagatgctctctagcctcaccttttagtcagcatctattggaaactgatacttgctgtaggagagtgaatcattttttaagaatgtgacatatatttccattctacaatacatagctccacacccatacctatacatcattggatttagtgagttatcaaaaaatccaaaagtaatggagttaaaagggagtgtattgaggcagtcatatggaaagttagagagtaaagtggaggatagatttgtggatttcattgtaccgatatatgaaattcttcaaatagccattaaaaataagcatttccaataactgtaaatggattaagcctattgcacatatgtttgagtgatagtgtaataaaatgaggagagatagcaaagaagctattactaagacatttctatatgatttggaacacaaaacaaggttcttgtgcaattcaaatgcatcttcatgaataaagtatgacaagggaaattattaccctcaaagggaatatttccctggagtattcaagacagcaggtttctcaagattcctatatagtaaggtttataatcccatcttgattccatatcacattacttcaatggggtcatagacggagcagaatccttttgatcatttcagtgattgctaatattttgtccacacaataatcttcttccatactaagtatttatgatgagtctactacagtggccagacaaaccttccaaggtatcaattatcctaactcattctgacaagatagctacatagtaaaattttaaaatttattcctctcttagctgttttacaacaacactatttcatgaattagtgggaaaataacttatttactttcccaagtgaagaaaatgtttctaatcaaataaaatgacttctaataatattgaaaatgaatgtagtagctgataaacataaagcaaggtatcatcattccttgttattaatcccatcattgtgtttttatgtcgcaggagccttataaatttttattggagtattttttgagtaaccacttctccaaaactatttttacagtacaatccagtattatattatctttaatattttgagaagtaaaattttatattcaataaaataataagtaaaactttaattgacatggaaacaatcacctatatcatctataaagttttgatgacccatatggatgtttgacatatttttcctgaaaaatggcaatagtcacagaatttaaaaatgaaaattatgacatttgcagaaatgcagagatatttatgggatgacaacccttctcttcaaataatcagctgaaacatagtgtgcatgatgccttgattgggttgttaatatatttctgattgtattgaaggatgagcttgcacaaacagggtgaacgacgtgtcttcagatcccagggtgtcattcattcttaatgtacatagttcttcgttcaattttgttttcagtactctacagcccattcttttggagtttgttttttaattagaaaatcatattacaacgatttttaaacccaaactcgttagagatatattggatttttcaatacatttatgctagatatagactattaagaaaacaccttttcttgattctctgaactgtaacaaacacacacacacacacacacacacacacacacacacatttatattcatacatatataaatgtgtataaatatttatgtatttatacttttactttatacttttactttttcatatactgtagctctccttccttattctgataaactgttaaacaagtagtatttatcaggctacgaatttgaacaagaatggagagggttatctgaggtgatttggagggagggaaaggaaggataaatgttttaacagcactataatctaatttttaaatataataaaatttcacagcataaacattcataattccttatataagaattttataatacaatcatgaattggagtgatgtgtgttttctctgtttaaataatctaaatatacatacagttttcaatatatttttgatacttgtcttaattgcttgacattggtctccagaagtccatactgtaagcccaggtacatgtgtctttgtgctataacttgactgtgttacacagagtgttctggatagtctgtatgggcccaaaggagacagcagacatcatgaagacagaacatatttcttctgtaaacgttcacactttatgccattctgaatgtgatatattaacaaaatttaaaaaggtcagacctgtggaacacaatgaagcaggaccaagagtggagggatgaaggacaattgttaacaggcagggatactcaccaccatactaatgaggaagaggcagtcgttgaaagggaatctttgaatacaagctaaaatataaattcaaagaatgaattaattcatgataacttggtttttcatggctcattataatagctaacacagtcacctatatgggagatgaaggaatatcaccgaaatgctacaagtagggaagaaatgagaggctgtagtgtatagatagagaacaaacatgatgcaagcctgactgatttcaaaattcacctctatcttgaagccttaggctcttaactctcttatccaggaaaatatcatcttccactctaatactagtaaagcaactactatttatcaaccctttcccattcattatctcattcaaatcttacaagaattacttcgatatgctcagtgcaacctacacactatagaaagactggatacaaattaatgtcttttaatgtctttagaagtaaatatgaaaggtgataaatgaatatttataaccatttcctaaaatacacattttatatcttatactgtatcttcattacagaataaactttttgtttgaactggagtgtaatgacacattcattatatatatatatatatatatatatatatatatatatatatatactattcagatatttataaattatgctacagtttagtttcaagtactaagttgtatacagcaaatgtaatgattgaggatgaactgaatgaacttaaatgaattcaaattcataaatagaacatcttgtacagtacttcttaacttatctgacactctgtcctctctgtgaatgcctgcaaatcttatataatttcacaaactctttgatgctataggcttgtataaatatggtagttataactaatcagcttcacaggaatgaagagactaagtgtatctctgcatatagtatgccaggcatgtgagcctttgttcttttatatctgtctatttcaaagagcatcctgtggatacagaaaagggtctatgaagaataacataggagtgagttaattcatcatcccaggaataagaaaagctccatggcttcatgtctttttctatatggtattgacatttttctatgtcttcactttgtttgggaatcttgcaatgatccttctgattttactagatgctcctctccataccctcatgtacttcttcctctgtaatctgcccttggtatactttggttcttcctcaacagtcactccaaaagtcatgactggactccttccagtaagcaatgtaatttcctaccatgcctatgctgttccaatgtccttctttgtgttctttgccacagtggatagctaccttttagcctcaatggcatatgatcatcatgccacagtgtgtaaacctgtacataatattgccaccatgacaaaagctgtatgtaattttctggtcattggctcctatgtatttggcattttgaatgtttctatacaaacatgggacaccttctacctccatttttgtatatacaatgtgattaatcaattctgtgatattccaacactgagggttctagcttgatctgataagcagatgaatgagatgattcttttctttatgtctagccttctcatcatgtttgcttttcttgttatcttgacttcctactttctcatatgagtattttgatgatgcattcaggtgagggataccagaaggctttctcacatgtgcttctcacctcactgcagttttcacattttatgggcctgtcaccacaatgtacttaaagccaagttccattcattccatggacacaggtaaatttgtctctgagttttatactatggtcatccccatgctgaatcccatagtctacaatctgaggaaaaaagaaattaatgcacttaagagggttgttcaaatttcaaatctacttataggtttggtacttgagtgatgcacattggttgaattatcattaattgtctttgattacttacatgttaatgatcatatgaaatatttaaaacatagaactctatatattaatctgattccttcttttatctgatgaatgcatgtgcacaaagactttgttccagttagatttggtggatgatgcttctatgtatttgcaagagttttataacaaagtttataagatagtaaaagcataaagactaaaaatatattatggtttatatataaaatgtccttgatgaaatacatgcttattcttgtgatatattcatagttactaaattataataagaaagaaatatataatctactattgagtgccagaccttctcctgtccacctcccctctctcattggtgtccaccatcccacccaccaaatcccccagagatctgggggtagtctaaaccatccagtgtctgctgcctttggagtcttgcacccacttggagggagtgagtacagaccaaaccatacagaatctgctgccatcagaaccttaacctgcattaccaggtgagggagagacctcaaatgcacccactgcaagaaaggatggaaagatgacagtataagaacacattcaacaacaaaaagactaatatgataatgccagagtctaggggttctacatgtgcaagacctgaatgtcccaaaacagttgacacagaagaaaatgacgttaaaaacaacttaatgaagatgatagagactctcaaataggaaatgagaaaatccttaaaagaaatggaagaaaaaataacccaaaattgaagacaaaccaaaacatgctagaaatcaacaaatctcttagagaaagcaaggaaagacaagaaaaaannnnnnnnnnnnnnnnnnnnnnnnnnnnnnnnnnnnnnnnnnnnnnnnnnnnnnnnnnnnnnnnnnnnnnnnnnnnnnnnnnnnnnnnnnnnnnnnnnnnnnnnnnnnnnnnnnnnnnnnnnnnnnnnnnnnnnnnnnnnnnnnnnnnnnnnnnnnnnnnnnnnnnnnnnnnnnnnnnnnnnnnnnnnnnnnnnnnnnnnnnnnnnnnnnnnnnnnnnnnnnnnnnnnnnnnnnnnnnnnnnnnnnnnnnnnnnnnnnnnnnnnnnnnnnnnnnnnnnnnnnnnnnnnnnnnnnnnnnnnnnnnnnnnnnnnnnnnnnnnnnnnnnnnnnnnnnnnnnnnnnnnnnnnnnnnnnnnnnnnnnnnnnnnncaatggaaactctgagagccaaaaggtcctgaatagatgttctacaaacacaaagtgatcatggatgccaggccagattattgtaccgagaaaagctgtcagtcactgtagatggagaaaacaggatattctatgaaaaatcagttttgaacaatacatatccacaaatccagccctacaaaaagtagtggaaggaaaactccaacccaaagaggttaactacagtaaaaaatacaggcaatagatactaccacattatcaaaagccaaaacaggagtggggaatccacacacaataccaccaccatcaagaaatccaaaagaaatgagattgaacaatcaatggtcattaatatccctcagtttaatggtcttaactccacctataaaaagacacaggctaatggaatggatacaaagacagaatccaaccttctgctgcatacaagaaacacacctcaacttcaaaaacaaacattacctcagagtaaagggttgggaaaatattttccaatcaaatggaccttaaaaacaagatggtgtggctatcctaatatctaacagatttgacttcaaactaaaattaaagaatgggaggaagaaggtcatttcatattcttcccaggaaaaatccatcaagatgaagtctcaattctgaacatctatgttccaaatacaaaggcatccacattcataaaagcaacattactgaagctcaaatcacacataaaacctcatacacttctagtaggagaattcaacatcccactctcacccctggaaaggagtaccatataaaaacttgacaaatatgtaaaggaaattacagaagtgataacccaattggttttaacaagcatctatagaacactccatgcaaacaccttcttttcagtgccacaaagaaccttctctaaaatcaaccacatactcggcaacaaagcaaagctcaacaaattttttttaaaatggaataacctcctgtatcttattggatcaccatgatttaaagtttgaattcaacaacaacacaaattgcagaaagcctacaaacataaggaaattcagcaatgctcaatttcatcactcctgagtcaaaaaagaaataaagaaaaatttaaaaacttcctagaattaaagacttcagtgaaaatgatggcaaaatatacccaaacttatgggacacattgaaagcagtgctaatgggactaattcatagcactaattgcccacatgaacaaactggagaatagtcacactagaaacttcttaatagcacacctgaaaactttagaacaaaaagaagcaaactgaccttggaagagtagatgccaccaaataatcaaattgagggatgaaatcaataaagtagcagcaaagaaacaatacaaaaatcaatgaaacaaagagttggttcttcgagaaaatcaaaccttacatgtgagtggaccaaaacctcaacataaatctagcaacactgaacctcttagaggaaaaagtggaaagtacccctgaatgaatcagtacaggaaatcacttgctgaacataacaccagtagagcttacactgagatcgacaattaaaaaatgggacttcctgaaactgagaagcttctgtaaggcaaaggaaacagtcaacaagacaaaatggcagcccacagaatggaaaaaagatcttccccaaacccacatctgacagagggctgatctctaaaatatacaaataactcaataatctagtcactaaaacaccaaataatccaactaaaaggtaaggtagagaactaaattgagaattctcaatagaagaataaaaaatggctgaaatatacttaagaaactgtgcaataagcagaaaaatagggaaatacaaatctaaacaaatctgagataccatcttatacctgtcagaatggctaaagacaaaaataccaatgacagtttctgctggagagcatgtggagaaaggggaacactcctccgttgctcatggcagtgcaaacatttatagccaatttggaaatcagaatgaagctttctcaggaaaataggaatcagtctacctcaatgtccagcaactccactattatgcatgtacccaaaggaagcacattcacaccacaaggacatctgttcaacaatattaatagcagtgttgtttgtaatatccagaacctggaagcccctcgaccaaagaatggataaagaaattgtggtacatttacacaatggagtaatacttagttggaaaaaagcagtgatatctttaaattagcaggcaagtggctagaactagaagaaaccatcctaagtgacataacccagacacagaaagacaaacatggtatgtactcactcataagtggatattagacattgggcaaaggataaccagcctgtaatccagaaactcagagaagataggaggaacctaaaagagatatacatggtccccagagaaggggaaaaggacaagattgcctgagccaattaggagcacaatatgaggatgaggaaggtaggagaaagaagaggagaaacaggaaggggaggataacatgagggatcaggaagataaagtctgggaagaatagagaaggagagcaagaaaagaggtatattaatatgtagggagccgttcctgcattctccattacaatgatggtgcctgcagacaccgaatgtaaattatttcgcaggcgctgggtaatttccattcctttgatctctgcctatcccgtggctcatttggcctgaggagctaaagccattcatagggtaacacatcccaggcgggctgccagcctttattaaggaacgggattcttgggccggggtctccgctctggtaagcttatgctctcccactctcaagatgcattaaagctttcctgcagaaggatccgagtgtcctgtgtgattcttgccggcgagaacatagcgcgcgggacattaatagagggagcaattataggtttaaagagatttctagattgcactagggaaatgtccagggatccacacagattagatacttagatccaaattaagtatctaagcaatagtggagaggctgccttaaatgtccttccctataatgagattgatgactaccttaaatgtcatcatagagccttcacctagtagctgatggaagcagaagcagagatccacagctaagcactgagctgaactcctggaacccagttgtagagaggtaggagtgatgagcaaaggggtcaagaaacatctggcctgagcaagtgggaagtcaccgacccaattctgacatttggggaacttgcacaggaccaaactaggccccctgaatgtaggagtaagttaggcggcacgggcagtccatgtggccccgggaagtggaaccctagtgtacaaatgggctttggaagcccattccctgtggagggatactctctcagcctagatacttgtgggagggactaggacctgtcaaaaatgatgtgactgactttgatgatccctcatgggaggcctcaccctccctggggagtggatgggtatgggatagggggttggtggggggcataggaaaggaaactggaattggtatgtaaaacagattgtttttaatttaaataacaaaaacagaaaaagcaagatgccccatattcattaattacaattaggaaaatgacacaccaatataaagcaatttatagattcaatacagaagccttcaaattacccagaacattctccacagatataaaacaaataaccctaaaatacataaggaaccagaaaatacctcagatagcaaaagtaatcctgagtaaaaggaatactagaagaactgttatcccatacctcgtaatatatgatggtgcaacagtaataaaaagaatacggtgctatcacaaaacaatacagacaaattatataaaacagagtacttgtaaccatactcattctgaattttttgcagaataatgaaattagagccatatctaataacacacacaaaattagattcaactgactgaaagactatgtcatgaaacctgacacaataaaaactttgaagaaagtgtaggtagtaaactcatgatccagacttaatgaggcatttgtgattttaaaacaaacttcatttaaagcagcctggtcatggcatatatgtttaatcccagtccttgggagggaggtagaggcaggtggaattctgtaagttcgaggccaaccagttccaaatagtgagttccaagacagctaggactgttacacagagaaaccctgtcttaaaaaaatgtcccagcatatgtctctagtaaaatattttttgcttattgcagtataaaacatattacaggtataccacataatcctacattgcaagctgttacagaaagatctaatcaaactctaaatgatacgctaattaagaagaaaggagtaaagaagtcccccagaaatagattgcataatgctttattaagcattttctaaatgatagctgcataaagagactggataataaaaaaactatggaattgaattaggctatatattttatagatgtactgacttcagaatggaaatcagattatgtgttacattggggaaggaatttattttgcttccataggggaaaaaacaatggataccatcaatattagatttgaacaagagatgcccttgattagaagggatgacagttaatcaaacagcatgaccattctgtctaaaataactttaaagaaaacaaatgctttttattggatcagatataacttgccataatggaatctccccaaaattaggattggagaagggttttgtttttgccttttcaggagaatgatgaaatccagctaaggaatctaaagaccactcactggacaaatgagacttctgaagagaaatgataaatcatccagcaaaaacgttccaagaaaaataatgaaatgtcctattattatatcacatctccaacaggataaaatttcataaatattcccaaatgtttgcttctgcttttctctatagacagataataaaatggtcttttgtaatcccagtccaattaaaatattaaagctgttttggagttggagtgtggctctctccttctcaaaagtcaagcatgcttgttaaagtaaaatccaaaatctctgtctcatgtcagaaaagccacctgatatgggacagaagatgaacaaaaattaatggactattacattgtcactaatctcataatcttttcgttttattttgactcattgaagcttttcttcaggtacacatattgactaaaatctataatttaatataaatatatatacatatattccattttaatgacattaatagtcatatgcagtactaaatgatttcagaaaaaaattcatcttgtttcctgtacattattttgaatttgagtctctaccagataactaggaattaagtttctgcactctggatgtacataaaaaatattgatcctttaacctctttgcaatctgcttcatgtaacatgtaaaatgtttaagttttctgcagcaaactatgaccatgattaagagtgactattgaagtctccaaaattatgatggaacctcacaatgatgattcaagtaggactatgatagaaaaaaaagcactaagctgacaaataccacctaaatactggcttttgatgggaaatgtactgtgtatgtccatcttattgattattgaataaagtacttctttggccaatgagacagcaagttagacaggagtcaagggggattctgggtaatgtagtagagaaatggtattccaggcaggaagtgacataggaaggagactcatatttaagaaaggagaaacaggaaatgtcccttttcccctttgcctcctccagtggcaggatgtgagccactggcaagagagggcgccagcaaaaggcatcctctgtaagataagtcataaaatatacagacttatgatcattaagactgagctaaaagatgagaaatcctagtcactggccaagcagcatttgaacctaacacaagtttctgtgtattaatttgggccctaactctggagggcggctggcgtaaagtgcacacgtggcggtggggctcggtggcttttggcggaaagatttattgtaacaggctttagaccacaaactgttcaggacaatttcaaggtggctagcggagatgatacagccttaccgaccactctagccaggacttgagacaagccctgtgctttcccattattcagacactgaacaacaaatgatacagctacctctcctcgaacttgaaaattaacccaaatttttcttttcaggattctctaaggatgctatcacctccagacagcaggaagttaatttaagtacattatgcccatattcccaagagttgggctgggtggcttcaagccactcaatgggttatggacatttgtcattattcaggggtgttgattgaaaattattattggttatggttgggaagaaagttgaacaaaggatactacaatcagagatcttaatttgaaaagaataaagggggatattgatatgataggatatgagggtagattgttgaatctactttgaaaagagggcatatataaacgggataaagaagactttgcctccctttctaccttctttatctctctctctccctctttcttttgtctcaccctccccttcccctactcccttctcttcccccaatgaaccttcccacataaaaaagaaatagaacaaaaggtagattattgaatctactttaataaagtttgtctgaagatcagggggcagagctagccactagctaaccatataagttggaggtctgtacatcagacaggaaggctgggtagagtgaggaatataggtgggaggacacaggagctaaatctcttttcagttgggaatttgagaaggtaaggtatagctatggtttgctttttgtttcgctgatctttcagcatttaaccatatatctgattccaggattttattattaagcctattagactttgtgctacagaagtgcttagaagagatcatattgagggaggtaagagagacccagagaaatgagtggagcaagttctctgagttgggggaagaataaaagagagcatggtaagagattccataatagagggagacataggtttagagagaattcaggcactatggaaatgtctggagatctacaaagatgacaccaagtaattatctaagcaacagaggagaggctacttttaatgccctcccatgataatgagattgaagactaacttatatgacatcctatagccttcatccaccagctggtggaagtaaaagcagacacccacagctaaaccttgaactgaactggaatccagtttcagggaaggaggagtgatgagcaaaggggtccagaccaggctggtgaaatccatagaaacagctgacctgaacaagggagagctctcagtctccagactgatagctgaaaaaccagcatgggactgatccaaacccactgaatgtgggtgtcagtgaggagaccttagaaatctatggggcctcttgtagtggatcagtacttatccctagcataggattggactttgggagtccatcccacatagagggatactccctgagactagacacatgggatgggtcctaggccctatcccataggacatgacagaatgggaagaacccctatggaaggcctcaccctccctggggagcagaaagggtatgggatagatagggtgttagtttcaggggtcagggtaagaggacagggagggggaatttgaattgacatgtaaaacaatcttgtttctaattcaaataaaaaatttttggactagaaataaatattttaaatcatatgtcttataaaggtataaatagagaatacacaaagaacaactcaacaaaaatgaagatagctcagttaaagtatgtgcaaagcatttgaatatatatttattcaaggacagtagtcttaaaagtatatggatgatcaaaataattaatagagatggaatatacaaataaaactaaaactagattctatttcacagccattaaaatgatgtgtgtacatgtttgcatatattcatgcatgtatgtgtgtgtaacttaagagcagaaaataacaagttacaccaaagatgttagaaagttttaataggaatgaaaaactgggtagaattataaaaagtttgataatattcaaagttagtcataattactataggaaagagtcattctcctaatactgaggtagtcaaagaatgggaaaaattccttcacacagtgctcatagaagcattactaacagttggcacacaattaagccaatccatgtgttcatcaactaagaatgaattaataggctgtcaagtgatggatcagcgttcaagagcactttctaatattgcagagtacctgggttcagttctcagcattaatatggcactcttcaactgaccacaatctgatattctgatgcccctgtgggccattcatatctgatgcccctgtgggccacaggcatgcacatggttgattgtagtatgaatagtaaaaacccagagacagtcattgtggttcaaggtgaagaccagaagagcaaagcaagccatctactacaaagttctcacctctaccaatgctcagacgaagaggggatcatgtgttctctttgcaactgcacttcttttcaacatagcttgggactaattgcggttctgagaccctgctcctgtcttataaacctctctagtgctgggattaaaggtgtaaactgtctttctcttttagactgattcattctcatgtagccctatatggctttgaactcacagagatccatctccctctatctctgagtcccgggattaaaggtgtgtgccatcactgcctgacctctattgctgtggctagctttgcattctgatctccaggcaagctttattagatagatcataaacaatatatcaccacagttttctagcataaatataggcaaatacacatatacataaaattaaagttattttaaaccatgaatggtggaagattatccaataaaaaaatggaatatcaatacatgctgcagcatacatgagcctagtcagtaccatgtgttctggctagtgttttctcagcatgatacaagctactgtcatctgagtgaaaggaacctcaattaatcccacaaaggagactcaataacaaaagccctgaaccaaaaaaaggtttatcatctatttctctcaagctttagaagcaactgtcattttctaatacactcaatctatacatacaagaattcactttaaattacctagtttcaattcatgaaagcaaattgaattactgtgatctaatcactcatttaaataaaacatgtaaaatgatagcactcttctatgagatgtgctagtaattcttactacacaggtaatatatgtctcttcttgatactctgttagaaaaatcaacctctacaactcatgactgaacaatcaaagcaatgctcaagaacatcactgaaacaccatgaaatgttcaaaatgtgtatattgcagtctttggagagcctgctctaagactgcatccatggtttgcaaaaataagtccttggatgtggcaggagtcaactttttctatatgagggtaataaggaagaagcattgctttcttgttgtaatgtcttttatttcatttttaaaaaactctatgaaaatctctcttccatacacatttcttttctctactctgttacatttcttcacatagagctacatctgtcttctatatcatttacttattcatgaacttactcacacaccattcagggaacaagctctggacaatatataaattatattttcagggtcacatagcattgcttgaataaacaataagcaacaaagccattatgatatacaaggaatcacacagtttctttcagggttagaaggtcacactgaccagctggcaatgattaaccatgacagtgtttggctgtgccggtgggaggcatggcctgtctgcaagtagctagagacatcatggagagtgacaataaaatgaaattcaggacttgagcaataaacacatgttggctgaatcatgagtcttatatcataaaagtgagtttaagggtaggggtagaaagtcaatttgctgagaagtttttgtacagggagttgtgtctttaatgttatctgccagggtttttgcaagtgaaaaactcaaaccaaagttatttcatgcctgaccatgttatagcaatagacacttggtaacttgtccttgagcaattcacctctagggcaactagtctattttggatttgctttgaagtctcaaattagagaatcttttaaaaagataggcatatacccaaaagaagcacattcatataacaagaacatctgttcaaccatgttcatcgcagcactatttgtaatagccagaacctggaaacaacctagatgaccctcaactgaagatagagaaaatgtggtatatttacacaatggcagaaaaaatggaatcttgaagttcacaggcaactggatggaacttgaagaaaccattctgagcgaggtaacccagtcacaaaaagacaaacatggtatgtactcactcatatgtggattttagacatagagtaaaggattaccagcctacaatccacactgccagagaagctagtaaacaaggactgtaagagagattattcatggtcctctggagaaggggaagagcaaattgggagcatggagggaggggagagggaaccaggataatgagaaggggagaagaggagggatgaggaagacatgatggtataggaaggttgagttgggggaagaacagaaggcatcaaaataagagataatataatagagggttacattataggtttaaagagaaatcaggcactggaaaatgtccagaaatctacaagaatgacaccaaccaacaatctaagcagcagaggagaggttaattcaaatgccttctcctgataatgaggttgattactaattcatatgacatcatatagccttcaaacaatagctagtggaagtaaaagcagacacccacagctaaaccttgaactgaactgaactgaaatccagttgcagagaattaggactgatgagcaaaggggtccataccaggctggtgaaatccatagaaacagctgacctgaacaagggagagctctcgttctccagactgatagctgggaaaccagcatgggattgatccaaaccccctgaatgtgggtgtcatgaggagaccttggaaatctatggaaagtctataagacagactttgaagaccccctatggaaggcatcatactccctggggggcagaaagtttatgggatatgtagggtgttagttgtgggggggcaggggacctggagtttacatgtaaaatagttttctttctaactaaaagcaaagaaagctatctttgtagatgagaatgttactattttcctgtgtgattctgaacaatgaaaaataaactagtattatttctaaatattaaatttatacaattaagacaaaatcaccttcctgactgtcaataaatatatgtgtgaccattagatggaatgaattcacaagataaacctgcaggcagtcaggaaaatatccataactatttttaaggaaaaacacaggatgatatgagaaaaataacagaaataggctacgagttcttagagtctgttgtcccataagtgttgttgagaatgttgctacatcagagtttctcatctggtggatcaataactgaattattgattgccagatgttgtaattatgtcatggccaatggcatgtgtcagcatagcaatgtgcacttctagtttcttttggagctgttcatttatatcaaatatatagatgcatgactgcatttggttatgaatgtataacaacattttgctcatagaaagagtacacataaataataatcaactaaaacagtacattaatgtccttcacaagaatattgacaagcaaattaaaaacctcatagctatgatcatgaatacaatatatttcttttcctatacaatatagttgcagaaacacaagaatctgttctgcaatttaagtgcaagtggaagaaaaactgaaaagctttattcatcttagaacattaaaattaaatcaatatgaactattttaccattagcaaaacttttgttaatgcactcttgacctccttgttcctcaaactgtagaccagagggtttaacatagggatgatcatagtgtaaaacacagatgcgattttgtcattgtccatggagtgacttgatgtgggttgcaagtacatgaatataattgtcccatagaaaatagacactgcagtgaagtgtgaggcacatgtggatacagcctttcgatatccagcacttgacttcatctttaggatagtgacaaaaatgaatatgtacgatatccagataactaagagagcaaaaaagatattgaagctcactacataaacaagaaccaactcactgacatgccgatcagagcaagagagaaccataactgctggaatatcacaaaaaaagtgatgaaccacgtgggccccacagaaagaaagactgaaagtgtccccaatgtgaatggacgcattcaggaagccacagaaataggaacctatagaaagacacacatacacgcttctagtcatagtggtagcatagtacaggggcttacacactgctatgtatcgatcataggccattgaggccaggagataattctcaacagtagcaaaggctacaaaaaagaacatctgagtagcacagtcattataggaaatgaccttgtctcctataagaaggccagtcatgactgtgggggtgacagctgaggaataacaaaaatcaacaaaggacagattgcctaggaaaaagtacataggtgtatgaagtcttgagtccagcacaataaggaggatcatccccaggtttcccacaagggtgatggtgtagatgatgaggaaggtgatgaaaaggggaatctgtagtcctggctcatcagtgagtcccagcaggagaaagtgtgtcacttctgtcctgttcttcatgagtatcatttttcaatcttaagatggtccatagccaggggaaaggcagaacatgatgatgaagaaaagcatcagtgagtacatatgccttttgatcaagaatctgtactttgagattgtctggaaaatggacctttccccaagtcaaatctgatcttttatttatacataaggttatacataatagattttaaagattattaatggagttctacccaattttaaaattttgtattccgtatagtcataaatagatgggggctatttaataatgataaaagcaatgtgtggatgatctccaaatttacctcttactccttatatctcactttctctaatgctcacttttcatagcctgctctaaacaaccactttgtgaatctaggtgactactctgtgaatcatctcaatgatattagaacttgctttcctgtaaattatgaaacacaagaaattgagcaatttatacatattactaaaatatgaaatgatagtctgtgctttctgtctctgactttatttaaccctaattgattctcaagtatcagaattcaatctgaattttaaattgaaaataacattaaacttaattacatggctgccttggcaagaactcaacattatttgagttacagagttctgtttctatttctaagcacatatttctgtgacagtcttttatctcatggaaaaggggccaggaataaagtgccctataaaataatcactttggatggccactaagttcattgtccttttttctttttttcttttaattagaaataaatttattttacatatcaatcccaggtccttctccctccccttctcccctgccccccaccaactaacaccttacccatcccataccatttctgctccaaagggagggtgagaccttccatagggttcttcaaagtctgtcttattctttgggatagggcctaggccaacccccttgtgtctatgctcagggagtatcctctatgtggaatgggctctcctatgctagggataagtactgatccaatacaagaggtccccatagatttgcaaggtctcctcactgacacccacattcagggggtttggattagtcccatgctggtttcctaggtatcagtctgggtaccaagagctctcccttgttcaggtcagctgtttaggacactgtgctaaacatacatattcagaaagtcagggagttctcatttttctctgaaattctcctcctcttcctcgatgaggttgcttaaaaaccaccattactgatagaacattttgtagacatacttcaaaatgtatgactttctctctatacattttctccatttccctactacagcatctgctagctttgaagcttatgtgtgtttctctcaatctctaataaaagtattttcaaacaccattctgagtttatttctaaagtattttactaatgagaataagagctgaacagggaagctggatatctaggtaacagatgtagtatatcactatgagcagtagatatgttgggataactcaggtgacagtagtcacttcagcttgatgcagttctgatagctagctacaggcagataatcataagctacagcacacagagagctttggtccattcactgtgttggattcattagtccttactaccctccctgaccactgacaagtcaacaatgtaatcagaccaactttggatacttccatgggaagacaaaagactgtaaaatgttgatgctgatcacatccagggattgttagatttcatgtaatgtttggacaggaagtgatctggtttgtgctgatttgttgtacatggacactgggaaggagagcttcatggctgatggtgttcacctctccctcctcatgttttctttcctcctgcagtagcaccactgagtaactttgctctccagggtgttcctgctccctctgaaaacactgattgctgctgctgctacaattcccagggtgcagtttccttgtaaagcatttcttcatttggtgaatttccactttccttcaacttattctttttttgtcctttcacagaatactaaagttaccaaggtcaaaataaaattgagagtttatggtgctctctgtctctcacagatcttttagaagtgccttttactttatgacaacattttatatgatgtggctgtcatataaaataacaatgtttcaatttctctatttgttttgtttccttggataccaaggcttattttaccccttaggttggtacttaattcctaagatgaacctatatcctacttgatgctttcaaaattgctgcaaaatggcagttttttcccttgagttgaagcctttgaaaggatatctactttaactaacacttattcaccaccaaaaatctactgaaattctgaatagttcaggtaatacagctattatttagattactttcagaaaatactatagtctacaagtaagaagaggattgcacgagaatgtataactaggtattattaataatgattttggaggtattattgaaaacactcaacatttaagaagttaccagtttttctaaagttatttctttatttgaaaaaattcaagttatttatttatttatttatttatttatttatttatttatttatttggtttgtggagacagggttgttctgtggctttggaagctgtcctggacctagctcttttagaccaggttgatctcaaagtcatagagatctgcctacctctgcctcctgagtgctgggtttaaaggagtgcaacaccaccgcccaggctaaaattcaagttatttttaagcctcatattgcaaaaaaaactcatagtttccacactttttaatgtaatggtcattttatatgattacaagggaactgtttacatttttagtgaatcatacagcatttttcaaatttcaaaaagatctgcttacttttgtatttttccatttttaaatttagaagcactcttattttatatatcaatcaccccattccgtcacactcccatagtcctatgaccccagagacccccacaatccacgccccacctattccctaaggacagtgaggcccaccatgggggaccatcaaagtccttcacatcattttcaggagggccgagacccactttctagtatgtgggctcttgtggatttttatgccttttttctgcaataatagtagcatcaataggagatagacaaattcacagatattcagtatgtattggttcttgcaaggctcataaacatgttgtgtaaagagaatacctaaatttcctaaaagagaagttttgcattcataccatgaacccattagttttttaaggaaactatttgtattatccctttctcttttaacactactcatggtgttattgctcactttccataaatttcaagtctcactgataatgatgatgcaatatataaggtcatcagttctttgaaagaaagaacgataactccaacatttagtatgagatcatcaagtcaaccacagaatgctggttacacagacctttctcacacagttattaaatattttcatgatgcctgacacactgaagaacagagggaaaaaataacataaatctacttcttaaactctacaaacccttcctctttcaaagaagggccactcactttccttacttacagatcaaaaatgaaactactgcatatttcactaaatttattacttgtaaatgaagaaaaagatgacagatctacatgctttcataccaatgaaaattctgtcaatatatcatttacctttgagtgtttgttaaacaatgcatgaagtctgacagaaaatcatcagttacaaggtggccctgaaagagataacagtgaataccattcaaatgcatagatggaaacttctgaaacatgacatcaagcacgttgttatttaagaagctaatgcatgaaggacaagaaaagctgtgtagactgggtcatccctagagatttcttttatgggaataccagcaactcccaatctcctttctaggaaggaagcaattaaaactgtgtctacttatatgcctatgggacgtgcttctgattgaactcagagagttattaatgacaatgaaataaggaagacatgcagttgggagaaaaggtaagagtcactgggagacgtagaagactggtagtagtggatacatatgatcaaaatacattatatcaacatatgaaattatcacataatgaattaaacatcatggaaaaactggagagactggttattctcactgttcacttgaggtcatattacacaccatgtgtccttttaaggtgtttctattgatgcatactatctatattccagagaccacacagtgtgtaatgtgtacttttgtgtaatgtgtcttgcatatgttctacacaatacctacaccaatatatctgagattgtcttatacaaattgtaaaaaacctaaaataaatctcaagagacaaaatgagagtcttttaatcaatggagaagtaaagatatttgaagtggagatataatgaaatgttagaaagggtcccttttttctgcattaaatgttctagtgttcaattagtctcagtgaagagtctgaaaagaaactcaaatacatgggttttgctttattaatatgcttcagtattatttatcagttttaagaacaaaatttgaaaggctagagagatttgcagtggttaagaacacttattgttccagcaaaggatcaaagtttgtttcccagcacacatgtcagggggcagacaactgacctgtcactccatctcaaggggatctgatgccattggcctcaaaaggcacctgaactcatatatgaccacacacacacacacacacacacacacacacacacacacacacacacaacacacacacacacgaacacacacatacagatgcacaaactcttaagatgctaaaataatcctttaaaaataaaatggtttgaaatgtaaattgcaatatgatttaaaaattctgatgaacgtatctataaagatctatttaaaactaagtactgtcatggcaattttagattaaggtctttcctatggagtacaaataacacattaggcataattattatcacattagtggtgataaaatgcatcaagatatcatttattatcaaagagcaaaaagttagaagaagtacctctgtaaaaggagctagattgattactacttcaatttccttttagttctaaaattttcaatagcattgactttgctaaatctggaacattctgtctcacttgcatgaatgaaattttcatatttgatagtcagaaaagcaaatttttcatagcaaataaataaatattctattagttctgattgtgttcatatccctatgtaaccagagtttgactatgagtttgggatttaaatagcatattcctagagatgaactcaaccaatatattttttggtgtaaatgggcttggctttctaaaggggaccaaggactaatgaatctatgttcatcaagaaagagagaatggcaaaccaaaatgctatttggcaaaattaaaatgtaaaatatcatcattggacactgaatataaagcatgtgaataaaatggtgtttatcaagaaatgtgtgataacctataacccatggagggatactctgtcatctcaggatcagggaggagggcctaacacctcccccaaattatgtgacagattttggtgatcccccatggaaggcctcatcctccctggggagtggatggcaggtgggatagggaggttgaagggggccaggagaggatgggagggagagggaactatgattgatatataaaatatgatggtttccaaattaaataaattatttaaaagaaaaaagaaatgcatgataagctttgaaataatatatcagcttaaaacttcatgtgttggaggctaagactcaaggtgacttcattaataaatgagacctttaggggagatgcttaataagtgaagcaaccttcattgtggcattgtgtgttcatctcataggaagcaatgaagccatttccagatcattgaggatcagtgtacatttacatggctattagggagttagcctgtacctctttgtgtgtttccttcttccacttattaaggattcagaattcatacctgtgagaacagtaaatactcaggcattatgctggcctgctcctgtcacctagcagaatgcattgaggcagtaccctggtcagcccaggattccatgactggtagtctgcatgcaggtggaaagaactgctttaaaagacagacaccagcccactcacactcctctctttcccactcttttttctgctgttcccctggagcaaaaggacttttcatgtctcactcttctcctctgtgttctctctgtctctgtgtctctatggctctttacctcttttctcactcccccttctctttctcataaaaatcctcactaagctgtctgcctgggatgtttttcccatcctttgtcacccttgcctaccatggaatcctccaagcttcccctagtgctttattgtaacaagaactttacagcttctatatatttgctttctatcatgaggaaatagagcaaaaatatgtccaacaaggaaggaaccctcacattacttaaaataaagttgttggcaatttgaatttggatggccaaccttctaaagtctgaaaaataaatatctgttgtctctacattttattgtttaaagtgttttgtcataagacagataaaccatcacatcatgaatgatacttttgaaatttttgtcaaacataacgtgccttgttactccacatgtcatgtgtggaagacaaaaggagataaggaatatgattgccattttaactcctggatatgttgctgaggataatgaaaccagtccaatcttgtgaatggctgatgtggaaacaataggatagtagatttgggttatacttccacttgagcaatgcaacttaggaaatttgacatccatactttagtggcattcatccaaacattcttaacacagtttaaaacagcatactgatatctctgaactagagatatttctttaagtgttcagttttttcattgattgctctgccaactcctgttgtattctgcctgtggcttttatatgccaatgaacacgaattctcatgggtactaatgatgttcaacatgaaaatttgggcttgccagtctccaaaactgagtaccacttattatttaaaacaaaaataaaattatggcacctgtgcttcgttgaatgtacatgatttttattaactaaatttcttcatcaattgttttacccaagtttccacccccttcctcctgccattccctcccccaaacctcctctctgccctacatcaaatccactccccctctgtttttattcataaatggccatgactcccatgggtgtcatcagagcgtggtatatcaagtttggtaggactaacctcctcctgtcatatgaaggttttataagaaaaccctgtatgaggcataggctcccaaaatcctgcaaaagcctcagtgatgggtctcattaattctgcttggaatcctacaaaactcacagaattttttaaaacaaatgtcattgattttgactattgaatttcactttgaaactttgaaactttcctgtatttagccaatgtaaacatggtcatatccatttacacatgttcctacaaaatccccaagcacaagcaaacatgagtatttctgtaattcatagcaattttaattgacaaaataattaatgtttaattacattgcatcctcctctcctagtttctttcatatatatatatatgcttataaagattctgagtccatttagtatggtttctgtttatctaatttcaggtctgaccaattatattgaacaaacaattaggggtcttgtacctggagaaactagttctccctttctcagtcattacttgcctgtagtactctccctggggatgatatttttccccctttgcatagcatttgtactgatcctgtcatttgtttaggtctctttgggcagcattattgttgatgtatcatgggtgttgctttcatttcatttcctttgtaaaaattttattaatggaggtcaattagtactattcatatgtgtgcaattgtgagatttcattcttagagtgaaaaacatatcaatagacaccctccaaagaaagtttggttattacaggtgtcgcatttggaaatgagccctccagagtcacttccctgcacttacaccagttgtaacatctctaacagtctctgcttcaaatacaaagcttctttaagaggacttacagacacactaatctaagggtgtaggggaaagtatttagatgtcagttggaatattttacttagttgtgggatttctcaaatacaaatatcaattatttacatgatacattgaacatattaatgaaatttaaggttttatttaagtgatgtgctacatgacacttaattagacaataattcttagtaaaacttattagagggtttgatattctacttgataaagggaatcccaggacaaaattaagaatagaagtaacaagtggaaacttagtgagaatgtacaaaataatgtttcagtagaacagaaaattagcaatatctcttgaattatgctgaatgtagctgctgttggtaattattgtatgtgattcactatcataatatatgatacaatgattcaaaatatgtgttaagctaaatttcccatatatgttactcatcagttatttttagataagctatactggcaaagacttctgacataatagaaaacatcacaatttttatcagcatgtttaaattatatacaaaagttttcttttagaattttatacatacacagaggtatttttaaactattgtctaatttatccatcactttctatcacacatgtatgtgctttaatgtatgtggttcatgcatgtatgagcatgtgtgtatgaaagtagaaaaaaatatttgaaccatatattcaaacaaaccattttgtgctcccatgaaatttatattccacaaaagaaagattgataggtatttataatgtgaatacatagtttgtgctataacaaaactattgagaatgacatttgagagcagaacactataggcagtgagttgagtacaactcagccatgaaggtggtgacaacaggattttttgacacagtaatatttgagcaaagtcctgataggaatgagatcatttctcaaagttcctgaggcaaggtcatatttataacagtaatgagcaaacaatgatgagactgaagagatgacaggagagattacaaataaacaaatgtagaaaagaaatagccagctgtttcgtaagaatgtacacattattgctcttttgttataagtctatttagtagtagaaaaaaacatagatttttaaattttattatattactatgttctttgacaaggtattctattgaaaattaaaatatgaacatattgaccatataaagcatcatgatcaatagaagtactaattcataggggatgtcagaaaagtacaccttactttaaaacattcacaaagctctttcactgtaatttaataattcatcacctgaaagtggatttgtagaatggcaataaagtaaataagtaatatgtagcttttataacataatatcctaattaaaaattaaattatcaataacaaatgatgatggattattttttctgttgtccactgaaactatatatatatatatatatatatatatatatatatatatatatatatagaaatgggaaagaggaaggagagaaagaaggtagatggagaaggggaaaagcagagggtggggaaagagaacaggagagaacataagtgaaaagaacagaaccatctacccagacagtgagaggaagaacaggtcctttctctggcttctattctattcaggggagcctacaatgaaggagatgctatcaatacatattgatgacagcaaatttttatgaattcacttctgtaagtagaagatatttagaaaaaccctttcaggcacaactaggcaaatctcacatatttaaatgggttaatctgaatccagtgaaatggacagatgatatcaacctccaaaacagccatacaatataaattaaaaattactcatgtccatgagtgtctttcttcataagttgcccatttgcatgtctgttgttcacaagcttctctctacatttatgtgctttaacttcaacatgctaaagcaagatgaagaaaatgagtaaatccatcaatatcctgatttaaggttttgtgagcaatgcctcatgttttacacaccataatttaggtgaattttttaagaaatatttttgtttgtttttttctgcaaaaaaaatgtttcctggactttcacaaaagtttaaatgtaactcaggaacaagaaaatatcacaaagattgatcccaagtatcatgagtctctgaagtgagaaaacaaaatcatgaagactttgcctcccaaactatttttctgaatgcacccttcacttctttgttcctcaagctgtagaccaaagggttcagcatgggaatgaccatggtgtaaaacacagatgtcattttgtcagtgtccatggagtgactggagctgggttgcaagtacatgaatatacttgtcccatagaaaatagataccacactgaagtgtgaggcacatgtggatacagcctttcgatatccagcacttgacttcatctttagaatagtgacaaaaatgaatatgtatgacatccagataactaggagagcaaaaaatacattgaagcttgctacataaacaagaaccaactcactgatatgtctgtcagagcaagagagaaccataactgctggaatatcacaaaaaaagtgatgaatcacatgagccccacagaaagaaagactgaaagtgtccccaatgtgaatggaggcattcaggaaaccaccgaaataggaacatatagaaagacatacatacacacttctagtcatagtggtagcatagtatagcggcttacacactgctatgtatcgatcataggccattgaggccaggagataattctcaatattagcaaaggctataaaaacgaacatctgagtagcacagtcattataggaaatgaccttgtctcctataagaaggccagtcatgactgtgggggtgacagctgaggaataacaaaaatcaacaaaggacagattgcctaggaaaaagtacataggtgtatgaagtcttgagtccagcacaataaggaggatcatccccaggtttcccactaaggtgatggtgtagatgagcaggaaggtgatgaaaaggggaatctgtagtcctggttcatcagtgagtcccagcaggagaaagtgtgtcacttctgtcctgttcttcatcaatgtcgtctttcaatcataagatggtcaataaccatgggcaaagagaaacatgatgatgaagaaaatcattagtgagtatttatgccttttgatcaggaatcagtacattgaattctctggaaaatggacttttacccaaatcaaatctgatgttttatctatagagagggttatattgaagagatttttaaagattattaatggagctctactaaatttataattttgtattctatatagtcataaatatatggggactgtttaataataataaaaacaatgtgtggatcatctccaaatttacctctgacgatttatatctcactttctctattggtcacatttcaaggaatgttctagacagccaccttagctgatgactctgttaatcatctcaatgatattagaactttctttgatataaattatggaacacaagaaattgagtaatttatttatattgttaaatttgaaatgctagcctgtgaacttatttatttctgattatcaagtatcagaattaagtcagacttttacttgaattgaaatagcattaaacataattacatggctgccttggcaagaacctaacattgtttaagttgcagatttctgtttctatttcaaagggcacattcctgttacagtctttggtcccaagccacaggggccaggaataaagtgtggtataaaaatggtatttttgggttgctactaagttctttgtccattttctttatctgtattttgtacactgttctaagcttacatattccgaaagtcaatgatttctcattctttttctgaatccctcctcttctttcttggtgaagctgattaaaaaacatcattgctgaacagagaacatttcatagacataactcaaaatgtatgacattctctatcccctttcccatccccagactacagcaactgctagccttgaaatttacctgtgtttctctcaaactctaataaaaattattctcaaacatcaatatgagtttatttctaaagtatttcattaatgagaataagaaatgaacaggggatgttgggtatctaggtaacagaagttattaaaatgttgatgttgatcacatccagggattgttagttttcatgttatgtttggataggaagtgatcttctggtttgtgctgacttgttgtacatggacactgggaaggagggcttcattttagataatattgacctctccctcctcatgttgtctttcctcctgcagtagcaccactgagtatctatgctctccagagtgttcctgctccctctgaaaacactgattgctgctgctacaatacccagacccagtttccttgtaaatcatttttcatttagtgaatttccactttccttcaacttactctttctttcatcctttctcagcatactaaagttaacaatgtcaaaataaatttgacattttatggtgctctctgtctctcacagatcttttagaagtgcatctactttatgaaatcatttgatatgatgggaggtaatataataacaatgtttcaggttctatatttgttttgtttccctggatactgagttttattttaccagtttgtttgccccttaattccttagaagaacctatcatccttctacatgctttcaaaatggttgcaaaatgggcaggtttttggtttttttgcttgagttgaagcctttgaaaggaaatcttcctaagaaaactcattcccaaccagacatctactgaaattctgaatatttcaggttatacacacctattatttagaatacttccagaaaatagtatagtatacaattaataagatatttgtattagagtgtataaatgggtttaatgttgattttggaggtattagtgaagaaaatcaacgtttatgaagttaccaattttctatttttaagccttataacttcagtaaacccatattttccacattttcttaatgtaatgattatctgtatatgattggaaggggactgtttaaatattttagtgaatatacagcatttttgagatttcaaaaacatcaggtttctcttgtgtttttatgcctttttcctgcaataatagtaacataaataagaaatagaaaaaaccaaagatattcagtgtatcttgtcttggtttttgcaagattcatagacaagatgagttaagagaagacctaaatttcctaaaacggaaatttttgaattcataccttgaaacaaatttgttttataaagaaactgcttaccttatccctttccattttaacattattcacagtaagtgttactgcccaactcactttccataaatttcaattctcactgaaaatgtttatgcaatatattaggacatcagttctttgtaagaaagaagaataactccaatgttgagtatgagatcatcaagtcagccacagaattctgcttatacagatatttctctgtgatggattgaatattatcatactgtctaagacattgaagaaaagaggaaagagaaaatgaatatgaatctacttcctaaactctataaagcctttctctttcaaagtaggggcactcacttgccttacttacagataaaaaactagaagtttgcatatctaaatttattacttgttaatgaagaaaaagatgacaggtctacatgacatcataccaattaaaatctgtcaatatagattttacctttgagttttgttccttatccattcatgaagtctgacaggaaatcttcattcatgaggtggccatgaaagagattacagttaatatcattcagatgcatagatgaactcttctgaaacatgacatcaagcatgttgctttttaagaagctaatgcatgaagaacaagaaaaactgtgtagactgggacatccctggagttttcttttatgggaataccagcaactcccaatctcctttctaggaaagaagcaattaaaactgtgtctactcatatgcctatgggaagtgcttctaattgatctcagagtgttattaatggcagtgaaataaggaagtcatgaagttggaagaaccctgagagtcactgggagaggtagaaggcatatgcatatggtggatgaatatgatcaaaatagattacatcaatacatgaaattatcacataatcaattaaacatcatggaaaaacagggcaggctggttattctcactgttcacttgggttcatattatatgctctgtgtccttttcatgtgtttccattgatgcatactatctatattccagagaccacatatttttgtgtaatgtgtcttgcatatgttctacaaaatacctacaccaatatatctgagattgtcttatacaagttgcaaaaaactaaaataaatctcaagggccaaaatgagagtctttcattaatggacaagtagagatgtttaaaatggagatgtaatgaaacttcagagagggtccccttttctgcatgaaatgttctagtgttcaattggtctcagtgagcatgaaagaaactcaaatacatgtgttttgcatttttaatatgattcagaattatttatcagttaaagagtaaaattcaggaagctagagagattgcccagtggttaagaacacttattgttctaacaaagaattgaactttgtttcccaacacccacatcaggggacagacaactgacctgtcactcaagctcaaggggatctgatgctattggtctctgggcacctgcattcatatatggccacacatacccacacacacacacaaatacacaaactcttaaaaaatattaaaataatccttgaaaaataaaatgggtttgaaatgtaggttacaatataatttaaaaattctggtggaaggcaaaggacacagtcaacaagacaagatatgccccaatcccacatccgacagagagctgatctccaaaatttacgaaaactcaagaagctagtctccaaaataccaaataattcaattaaaaagttgggtacagaggggcgtaggctgtggaagcctggcagccgctgaggcagaggtggtgtcagctctgactgcagactcagctgcagacactgcagggacaaccgccaccctctagctgcagccgccgcagcagctgcagcctcagccgcccgactggatcacaagcccagctctccaaggcagccctggctgctaaactgctgacgctcagcggcgtgttcgccatgcacaagcccaaggtgcccacgtcagctgagctgctcagtctgctgaaggagaaactgctgggcagaagctgggatgcctttggagaattggggaaagcgaccgacacgctggattctaccgggaaggtaaccgatgagaagccgtacgataaaataacacaagaagatattgaaggcattctgcagaagtttactgggaatataatgcaagtaccccactctactctgctctgaagaaggatggacagaggctgtcaacgctcataagagaggtgaagctgtggaggccagacccgccaggctagtgactgtgtacagcgtctccttcctgagattccagccaccacgcttcacactggatgttgaatgcggaggcggcttctacatcagaagcttggtcaatgacattggcaaagaactctcttcctgtgcccatgtgctggagctgactcgcaccaaacaggggccgtttacacttgaagagcatgccctccccgaagacagatggaccattgatgacatcgcacagtcccttgaacaatgcgcatctcttttgccagatgagttggcgtttaaaaaaccaaaatctgagaaatccagtgaccaggctttaagctatgaatatataactttaagcgagacaaagagggaagaggatgaaattaagacactccgaggccggcccgggtggtgtgtgtgccctgacccaggaatggccacctctttgcagaatgtcttagtgttgttgaacgatgaatgtgattggattaagacaaatcagctttctgaatttgatctttccttaatctttttcgtatgaaaaagtaaacaattttctaattacggaaaacaggtagtcctgttagtctcacagaagacccttgaattaatcggtactggagactgcttcctgaacataacaccagtagcacagacactgagatcaacaattaataaatgtgacctcctgaaactgagaagcttctgtaaggcaaaggacacagtcagcaagacaaaacgacagcccacagactgggaaaagatattcaccaaccccacatctgacagagggctgatctccaaaatatacaaagaactcaagaagctagtctccaaaacaccaaacaatccaattaaaaagtggggtacagaactaaatagacaattctcaatagaggaatctaaaatggctgaaagacacatgagaaagtgttcaacatccttagtcatcagggaaatgcaaatcaaaacaactctgagataccatcttactcctgtcagaatggctaaaatcaaaaataccaatgacagtttatgctggagaggatgtggagaaagaggaacactcctccactgctggtgggagtgccaacttgtacagccactttggaaatcagtatggtgactcctcaagaaaatgggaatgagtctaccacaagatccagcaattccactcctaggcatatacccaaaagaagcacattcatataacaaggacatatgttcaaccatgttcatagcagcattatttgtaatagccagaaactggaagcagcctagatgcccctcaaccgaagaatggatagagaaattgtggtacatttacacaatggagtactactcagcagaaaaaaacaatggaatcttgaaatttgcaggaaaatggatggaactcgaagaaaccattctgagcgaggtaacccaatcacaaaaagacaaacatgatatgtactcactcatatgtggacctgctttatgatacatagtagtgaccatgctttatcagagctgtttttaatgatgttgctcagaatggtttcctcccagatgatgattgagaagctaatttaaaaaaaaaatggtgccaagtaccacaagagtaacagaactgtgctgttttctgggattttgttttttacttttttttgttgttgtttgtttttttgtttttgtttttttttttttttttaaatggagtgtgctggatgtctctacaattttgttcaaatgactgcagaacctggaaaagctgttgctgctattgatgcataacatattgccattattgatatatatatatatatatatatatatatataattgaaactcaaatatgtgatgaatccaaggtgtttcagtgagtgctcacctgtgcatgcaaatttgatttcatctttagtaagtagtaaagttatatgcttgccaaaaaaaaaaataagtgacacactggaagacaaatgtcacacaatttcaattttatgtgtaacctagaaatgatgaacttatgggagcagagagcagaattgtggctattaggcttcaatgtgggtcttttaacaatggggaaatgattggtttaaggatataaaactgcagttggacaagaggcatggactctgtgaagtcttgaggtctactgagagcatgataaatatggttgataacaatatgctatattttaaaagttgtgagatagtatactttaagtgttctcaaaacaaaaatgatgaatatgtgtgatataacatgttaattggtttaatttagccataccattgtgaacatactgtattatgtatcataattgtgcatgactttatttatgagctaaataactgaatggaaaaaaagttgggtacagaaataaatagacaattctgaatagaggaatctaaaatggctgaaagacacttaagaaagtgttcagcatccttagccatcagggaaatgcaaatcaaaacaactctgagataccatcttacatctgtcggaatggctaaaatcaaaaacaccaatgacagtttatgctggagaggttgtggagaaagaacactcccccactgctggtgggagtgacaacttgcacagacactttggaaatgtgtatgatgattcctcagtaaaatgggattcagtctaccacaagatccagcaattccactcttaggcatatacccaaaagaagcacattcctacaacaaggacatctgttcaactatgctcatagcagcatcatttgtaatagtcagaaccaggaaacaacctagatgcccctcaactgaagaatggatagaaaaaaatgtgatacatttacacaatggagtactactcagctgaaaaaaaaaaaggcaatggaatcttgaaattcacaggcaaaccgatggaaccagaagaaaccattctgagcaaggtaacccagtcaaaaaaagacaggcattgtatgtactcactcatatgtggattttagacatagagttaatgatttccagcctgcagcccaggctgccagtgaggctggtaaagtaggaggaccctaaggaagatatacatggacccctagggaagaggaaagggacaaatctcctgagaaaattggtagcatggggagaggggagaggaaactaggagaatgtgaaggggagaatagaggtgaggaagacattatgggacagggaggttgagttgggggaagaacaggagagagatatataagagataatataatagagggagacattataagtttaaagagaaatcaggcactagggaaatgtctggagagctacaaagatgacaccaactaataatctaagcaacagaggagaggctaccttaaatgctctctcctgataatgggattgatgactaattcttatgccatctatagccttcatccatcatctggtggaagtagaagcagacacccacagctaaaccttgaactgaactgaaatccagatgcagagaaggaggactgatgagcaaaggggtacagaccaggctgatgaaacccacagaaacaggtgacctgaacaagctgggaaaccagcatgggactgatccagactccctgattgtgggaggagacattacaaatctatggggcctcttgtagtggatcattacttattgctaacataggaatggactttaaaaacccatcccacatggagggatactctctgagcctagacaaaaaggggttagcctaggccctatccctaagaatgggacagactttaaagagcccctatggaaggcctcaccctcccttgggagcagaaagggtatgggatgggtagggcattagttgcggggcagaggaggaggggagggaaagggatctgggattgacacacgacataattttctttctaataaaaaaaaattctggtggaagtaactatgaagatcaatttaaaagtaagtattgtcatagtatttttagattaaggtttttcctatatagttcaaataatacataagtcataattattatcctggtagaggcaataaaatacatcaagatatcatttattataaaaaccataaaattggaagaagcacaagtgtaagaggtgttgggttgattattacttcaatttccttgtatttctacaattctcaatagcattgactttccttaatctggcatattctggctcacttgcatgtatagaattgtcatatgtgatagccagaaaagcaaaattttcatagaaaataaatcttctattagtcctgattgtgttcacatccctttgtaaccagtgtttgactatgacattggtatttaaggagaatattcctagagatgaactcaaccaagatatttttctggtgtaaacgggcttggctttcttaagggtaccaagcattaatgaatctatattcatcaggaaagaggaatgacaaactaaatgttatttagcaatattaaagcataaaatatcatcattgcacactgaatataaagcatgtgaataaaatggagtatatcaagaaatatgtgataaccgattccctatggagggatcctctgtctgcccagaatcaggaaggagggcctaggaccttccccaaatgatgtgaagactttgatcatccccatggtaggccttacccgccctggggagtgcatgtagggtgcgatagggaaattggtaggggccaggagaggatgggagggaaagggaactgtgattgatatgtaaaatatgattgttttcaaattaattaaataataaaaaaatgtgtaataagctttgaaattatatttcaccttaaaaattcatgtgctgggagtttgaatgcaccttacccttgtaccctttccaccctctgccctctgcctgccgaatgaggtgagtttgggtgctgctctggcacaaacctcccccaacaagccctgctcacttcctcctgagcctcccctgggcaagagtggacctgctcagactggacgcccaccctgagtccagacacacaacactcttcattcccccactgctctctgccctctccctgctgcctgagagagggagagaccccacctgcaaccactggaaaaaggaaagggaagactataacataagaatacactcaacaacagaaaaaccaatataacaccaccaaaatctagggactccataccagcaagatttgaaaagcccaaagcagagtatgaagaagagatttaccttaaaaattatcttatgaagatgctagagaccattacagaggaaagaagaaaatcccttaaagaaatagaagaaaaaaacaagcaaaaactacatgaaatgtaggagaagacaaaccaaaaaatgcaagaaataaacaaatctcttaaagaatctaaagaaagccaagaaaaaaaaaaaaaacatccaaataagtgaaggaaacaattcaagcagttcacagtttgaaagcagaataagaaacaataaggaaaacagagaatgataggatgctggaaatagaaaagctggttaagcaatcaggaacccttgatataagcatagccaatagaatacaagagatgggagacagactctcaggtgttgaagactcattagaggatatacagtcatctgtagggagacactgtaaccacacctcctaagggctggcaacaggtgtgcctgaccatgcctgtcagggcgtggtgaaggtgaggtcaggatgactcatagtaggttcttaagggactgcagggcacatgggagccttctctctggccggtctgccgtgctgcccctggcacactctggcttgcatttggctgatgtttatctgaataaagatatcttaactttatggaatatggatcatctcttgttatccctggtgccctgaaatccatgacccattccggcttcctgcgagcccactgggcacagcccagaagctgcatgacccaagagggttctacgatactattgtgtgccaggtccccatgctgcaactggtcaaaagttcgacccacctgtggccagagatcctacgctgctaccaaaattccagcaaaaacagtgagttaaactttctcagcctgccgcccctcccactgcctgttgtgctcagtcctgctgccatccgactggcctggagagtttaaatcttccacaggcctccctgctggttttactgccccagatagcaaaaccgccgctgcagctgcatgctctcattcatgctagccacgtgtgggcgccagcagccctgagctacaagcaacagttttgacctattttgtcctgcctaaccaatccgagaaatttttcctttctgtgcggctgcagcagtttctgtggcctgcagccactggcaggaaaaccgcatgtcttcagccaagaccgcccactgcagtgttcccctcctgtgctaacattcccagctccaggtcctgaagctgtgctacagctgcgctgcccactgcgcctgctcagccaagagcccatacccagttccatctgcagagcttggtctccacccggtactgttctaaggttttcccatacctagtaaacacacacccaatcatttttatcacactctgtaagggtttttcaggaaatttcaactcaaaacaactgcaactgaacacctgtgctacatgtgccacctactggtcaaaattggttactgtatctggagtggaagcagcctaattcatctagctgaaaacatcctaccacatctggagtagaagctgactggtaaatatagccgaatacttatcattcacctcaattggtaacatttttgcttcttatgtaaattcaatgtcgaggaagatgttgatctgccaatgattggcctatatgctctactagctgttagtgtgctaatgcacacattatcactagctagaggtctcaggaacagggataaagttaatttcaccacctgcctacaggacatgcaagctttatacaatgaggttttggagaccagcctgacccatgataaatttatgcagtatgtagaacagaagctagatgataggctttgctctgtgtcttattcatcaaatggacccaagaaacaagctggtgtggcaatcctaatatccaacaaaccaggcttcaaactaaaatcaatcaaaagagatgaagaaggacatttcatacttatcacaggaaaagtccatcaagatgaagtctcaatcctgaacatctattccccaaatacaaaggcactcacattcgtaaaagaaacattattaaagctcaaatcacacataaaacctcacacacttatagtacgagacttcaacaccacgttctcatcactagataggagcagcagacagaaacttaacaaagaaacaaaagaactaacagatgttattacgcaattggatttcacagatatttatagaacatttcattcaaagacaaaagaatatacattcttctcagcaccacatggaacattctctaaaattgaccatgtaattggcaacgtgccaacctacacagatacaaaaaaattggaataccccctgtatcttatcagaccaccatgctttagagttagaattcaacaacaaaacaaattacagaaaccctgcaaattcatggaaattgaataatgcacaattgcaccattcttcggtcaaggaagaaataaaaaattagataaaagatttcctggaatttaatgagaatcaatgcataaaatacccaaacttatgggacactttgaaagcagtgctaagaggaaagttcatagcactaagtgcccacatgaagttactggagaataatcacactagagaattaacagagcaactgaaaagcttagaacaaaatgaagcaagctcaccacgcaggagtagatgacaggaaataatcaaactgagggctgaaatcaataaagtagaaactaggaaaatactacaaagattcaatgaaacaaagagttggttctgggggtggttgtaggggaggacaggtgggagaagggaactgggattgtcatgtaaatcaatcctgtttctaattcaaataaaaaatgttgaaaaaaatcattggttcttcgagaaagtcaacaacatagacaaacctttatccaaactaaccaaaaggcacagagagagcatgctaattaacaaaatcagaaatgaaagaggggacataataatggacactgaggaaatccagagaatcatcaggtcatactttgaaaacctgtactccacaaaatttgaaaatctaaaagaaatggacaatattctggatagatatcacttaccaaattaaatcaagaacagataagtgatttaaacagacctctaacccctaataaaataaaaacaatcatcaaaagtctcccaaccaaaaaaagcccatggccagatggtttcagtgcagaattctacccaaaattcaaagaagacctaataccagtactactcaaattgtcccacacaacagcagcagaagggacattgccaagctctttctatgaggctacaattaccttggtacccaagccacccaaagaaacaatgaaaaagagaattacagatcaatatccctcatgaacatcgatgcaaaaatattcagcaaaatactggcaaatcgaatccaaaaacacatgagagaaattgtccaccatgatcaagttggctttatcccaagaattcagggatggttcaacatacaaaaatcaatcaatgtaatcctccatataaacaaactgaaaaagaaaaaaaaatcatctttctagatactaaaaaagcctttgacaaaatacaatgtcccttcatgataaaggttttggagagaacaggaataataagaacatagctaaacatgataaaagaaatatacagcaaaccaaaggccaacataaaactaaatggagagaaattcaaggatattccactaaaatcaggaacaagacaaggctgtccactctccccatatatcttcaatattgtacttgaagttctagctagagcaataagaaaacaaaaagagatcaaggggatacaaacaggaaaggaagaagtcaaactttcactatttgcagatgaaatgatagtttacataagtgacccaaaaaactctaccagggaacttctacagctgataaacaccctcagcaaagtggcaggatacaagattaactcaaaaaaaaaaaatcagtagccttactatatacagaagataaacgtgctgagaaagaaatcagagaaacattaccctttacaatacccacaagcaacataaaatgttttgggttaacactaactgaaaaagtgaaagaaatgtatagtaagaactttgtgtctttaaagaaagaaattaaagaagataatagaaaatggaaagatttcccatactcctgtataggtaggatcaacatagtaaaaatggcaatcttgccaaaagcaatctacagattcaatgcaattcccatcaaaatcccaacacaattctttacagaccttgaaagaacagtactcaatttcatatggaaaaacaaaaactccaggacacccaaaacaaccatgtacaataaaggaacttctggagacatcaccatcccagacttcaatctctattatagagccatagtcctgaaacagcttgttattggcacaaaaatagacaggttgaccaatggaattgaattgaaaaccctgatattagcctacacacctatgaacacctgatttttggcaaggaagctaaagttatgcaatggaaaaaagaaagcatcttcaacaaatggtattggcataactgaatgtgcacatgtagaagattgcagatagatagagccatatttatcaccaaggcatcaatgacctcaacataaattcagccacactgaccctctgagaagggaaggtaggaggtaccctggaaaaaattggtccagaagactgctttctgaacataacaccagtagcacaaacattgagatcgacaattaataaatggacctcctgaaagtgggaagcttctatacggcaaaggacacagtctgcaagtcaaaacaccatccaacagaatgggaaaagttattcaccaaccctgcatctgacagagggctatcaccaaaatatacaatgaagtcaagaacctagcctccaaaacaccaaacaatgcaattaaaaagtggagtgcagaaattgaaagacccctgccccttagccctttctttctcaagtttgtctcctcctcctcctgtcggcggcttccccgatccccacccccggcctccacttcccccgccacccgcacacgcccggcccgagaacgagcaccaagtgagccggcctggagccctgcccctgagcccccgcccgatgagaaacactccgtcccaaggtctccgcccccaaggtcagccatctggacgcggagggggggggaattgagtctgttgtaccagacaccagaccttgagaatatgctgatctggaatggctctgtgtctcatttgaaccatccaatagaaatgattctgtatttcgcctcatttgaaagactctgtgtttcacctcatttgaataactctgtacttcgcctcatttgaataaccctgtatagcgcctcatttacattgaccaatgggaatagctctgtacaatgcctcattagaattatccaatagaatccctgcttctagcttgcgcctttttccctatataaggacccctttcccttggctcggggcgcttggcctcacagaagctaagtcgcccgggtacctgtatctccaataaagcctcttgcggttttgcatccaagttcgtggtctcgctgattcctgggtgcgggtctccttctacgaaagtacctcttcgggggtctttcaaaataaaaagagaatcctcaacaaaggaatctaagatggctgaaagacacttaagaaagtgctcaacatgcttagccatcaggaaaatgcagctcaagaccattctgagataccatcttactcctatcagaatgactaaaattaataacaccaatgacagtctatgctggagaggatatggagaaagaggaacactcctccatttctggtggcagggcaaacttgtacaaccacttttgaaatcagtatggtggtttctgaggaaaatgggaatcagtttacctcaagatacagaaattcctctcttgggcatatacccaaagaatgtgcattcctgcaataaggacatatgttcaactatattcatagatgcattatctgtaatagccagaacctggaagcaatctagatgcccctcaactgaagaatggatagtggaaatgtggtatatttacacaatggagtactgctcagcaaaaaataaaatggaatcttgaaattcacaggcaaatggatggaactagaagaaaccatcctgagtgaggtaacccagtcagaaaaagataaacatggtatgtactcactcatatatgattttagacataaagcaaagcattgccagtctatagtctacacttccagaggtgctaggaaacaaggaggatcccaagagaagattgcatagtacctcgaagaaagggagggggaggagaacccctgaacaaagtggaatcacgggatgtgggtggaaaggaaggaggtgggaaggcaagatggggagggaggaggagaacaggaggcctgagagaggggaggaatagaggagggcagtaatggagacaccttgatagagggagacaatgcagttatggagagatgtctggcacaggggaaatgttgggggatccacagtgactaacccaactaaaaatccaagcagtggggagaaaatgccattgatgcctataatgagattggtgtctaccttggttaccattcctacagccttcatccagtagctgtttgaagcagaaacaggcacccacagctaatcactgaaccatacccctcgaatccagttgtggagaggtaggagggatgaacaaagaagccaagacagttctgcagaaacccgcagaaacagttgaccagaacaagtgagaaaataggacactagtcacaaagatgtagaaacaccattggaccaaaccaagccctctgaatgtgggtgccagctaggaggccaagacagtctatgggacctctaacagtggagccagtctttaaccctagagaacagatggactttgggagcctattctctatggagggattctattgcagcccagatacagcaaggagggcttaagcccttccccaaacgataagaaagactttgatggtccctggtggagggcctcactatccctggggaggagtttggggatgggttgcaggggtggtgaacatgggaggatgggagggtgagggaatgggtgtatgtatatgtaaatatgagtagtaattaaagaatttaaataaaatattcatgtattggagcctaagactcaaggtgacttcattaataaatgagacctttaggggagatgcttagtacttgtagcaactctcagtgtgtgctcatcttataggaggcaatgaaccagtttccatatcattaaggatcactgaacacattcaaggctgtgagggagttagctagatctttttgtgtgtttccttcttccatttagtaaggattcagaattcacacctgtgagaatggtaagaattcaggcaataagttagcatgcccctgtcacctggcataatgtattcagacagtacgctggtcaaccctgggttccatgattggtagtctgcatgcagtggaaagtactgctttaaaagacagacactggcccactcacactcctctctttcccactctcttttctgctgttcctctggagcagacaagacatttcctatcacatcatgaatgacacttttgaaatttttgtcacacataatgtgccttgttcttcctgatgtcatgtttgaaagagaaaacaaattaaggaatatgactgccattttaactcctggatatgttgctcaggataatgaaatgtgtccaatcttgttagtagctgatgtggaaaccaataggttagtagatttagataatacttccacttgagcagctatgctacttaggaaacttggcatccatacttacgtggcatgtatccaaacactcttaacccagtgtaagacagcatactgatctctctgaactacagagatttcaagagttcattttgtcattgattgttctaccaactcccactgaactcttcctgtggcttttagatgccaatgaaccatgaattctcatgggtactaaaggtgtccaaccctgaaaatttgggcttgccagtctcccaaactgagtagcacttattatgtaaaaaaataaaattatggtgactgtgcttcattgaatatacatgatttttattaactaaatagatttgtttattgttttacccaagttacccctcccacctccccacaattccccctcccaaatctcctctctggccctcatcaaatccactctcactctggttttattcagaaatggccataatcacatgggtgtcagcaaagcatggtatatcaagttgaggtaggactaagctcctcccttcatattaaggcttggtaaggcaagacagtatgaacaataaactccaaaaaccatgtcatagcctcagtagcaggtcccattcctattgctaggaatcttataaaactcctatgaacctacaggtttttttgttggttgtggtggcggtgggttgtttttgtttatttgtttttgtttttgttttgttatgtgtttgtttttcaagacatggtttctctgtggctttgtaggctgtcctggaactagctcttgtataccaggttactctggaattcacagagatctgcctgccactgcctcccaagtgctgggattaaaggcatgtgccaccactgcccggagctaacatacatgtttttttattagttcaaattaggaacaagcttgtttcacatgtcaatcccttctccctctccctttccctctccctctcactttccctcccatcaccccaccccctcccacgatctaccccccccactctatccaccctccactccccaggcaggatagggccctcaatggggctccacaaagttcaccacatcatcctgggctgggcctaggcccttccccatatgtccagggcaagagtgcatcccttcatgtgggatgggctctcaaagtcccttcttacaccagagaaaaatactaatctactactagggggtcctctggagtgcagaggcctcctcattgacatccatgttcaggggtctaaatcagtcctgtactggcctcctagacagcatctggggtcgatgtgttcccgcttgttcagtctagctgtttctgtgggtttcaccgggctggtaacgaccctttccatcttcattcctccctctctgcaactaaattccagaaatcagttcagtgtatatctgtggatgtcttcctctgcttccatcagtcactggatgaaggctctaggatggcaaaaaaaaagtagtcatcagtctcattttagaagaagggcatttaggttatctctccaccattgcctggattgtcagttcatgtcatccttgtagctctctggaaatatccctagtgccagatctctccttggacctataatggctccctctaatatggtatccctcatcctgctctcttctattcttcccccaactcaaaatttctactcctccatttcctcctctcctcctgctctcattctggcagctcccttacccaatgctcccaattagctcaggatttcctgcccttcccattcctagggtccatgcatttattccttagagtccttcgtgtttcctagtttctttggcgaagaggattataggctggtaatcctttgctctatgtctaaaattcatatatgagtgagaacataccatgtttgtctttttgtaactgggtttacctcactcaggatggtttcttctagttccatccatgtgcgtgctaatttcaagattccattgcttttttttctgctgagtagtactccattgtattccattttctctatccattattcagttgaggggcatctaggttgcttccaggttctggctattacaaaaaatgcttctataaacatggttaaacatatgtccttgttgtatgaacgtgcattatttggttatatgcccgagagaggaattgatggatcttgaggtagactgattcccatttttctgagtaactgccatactgatttccaaagtggtcttgcaagtttgcactcacaccagcaatggagaagagttcctttttctctacatcctctccagcatagattgtcattggtgttttgattttagccattctggctggtgtaatatggtatctcagagttgttttgagttgcatttctctgatggccaaggattttgaacactttcttaagtgtctttcagccgtttcagattcctcaattgagaattctctatttagttctgcaccccactttttaatttcattgtttggtgttttggtggctagcttcttgagttccttgtatattttggaaatcagccctctattatagagccatagttctgaaaacagcttggtcttggcacaaaactagacagatagacgaatggaatcaaattgaaaaccctgatattaacccacacacctacgaacaccttatttttgaccaagatgctaaataaatacaatggaaaaaaagatagcatcttcaacaaatggtgctggcacaactggattcagaaatgcagaagattgcagatagatccatacctgttaccatgcacaaaacttaagtgcaaatgaatcaaagatctcaacataaatccagccacactgaattttctagaagagaaattgggagattcccttgaataaattggcacaggagactacttcctgaacattatgccagtaacatagacactggggtctgaaattagtaaatgggacccctgaaactgagaagcttctgcaaggcaaaggacacagtcagtaagacaaaacaacagcccacagaatgggaaaagatcttaacctacatgtttttttaaaacaagtgtcattcaatttgaatattgaaattcactttaaaactttgaaactttcctatatttagccaacgtaaatttcatcatatccatttccacaccttccttcaaaatcccctaagcccaagcaaacatgtatatttctctaattaatacaaattttaattaacaaaataattaatgtttacttacattgcatcctcccctccaagctccaactcctcccacatacccctcacccagacaaattgatggtttcatatatataatatatatatatatatatatatatatatatatatataatcattcaagcttctaagtccatttagggtggctttgttaatcaggtctcaccagttatatcgaataagcaattagggatcttatccctggagtagctaattctcgatctttcagtacttagttgcctatagttctttacctggtgatgtgatatttttcttttgtatagcatttgtgttggtattgccatttagtattgttggtgaatcatggatgttgctttcatgtcatttttttaaaaaaattattaaaaaatttattagctgaagccaattagtgctattcatagctgtacaattgtgagatttttctaccaagaatgaaaaaaacatatcaatagacacctcccaaagaaagtagggttgttacatgtgttcatttgcaaatgagccctccacagtcttcacttagaccagttgtggtcatctctaacagcctctgcttcaaaaggaaacttctttatcaggagttagagccacacaaatccacgggcgtatgggaagcatttagatttcagttgtaatattttatttacttgtgggatttctcaaacactaataccaattattcacatgatatatttaacatattaatgatatttaaggttttatttaagctatgtgctacatgtcacataattagacatcaattcttagtaaaatttattacagagtttgatgttctacttgataaagggaatcccaggacataattatgaacagatgcgacgaatggaaactcagtgagaacaggaaattagcaatgtctcctgaaatgtggtgaatgtagctgaagttggtaattattatgtgtgattcactatcacaacacatgattaaatggttcaaactattggtttaactgtattcaacagatatcttactcatttatcaattatttttggagaagctatactggcaaaacatctgacataatactaaacataattatttttatcactatatgttaattatacacaaaagttttcttatagcattttatacacacatacagttattttaagctattgtctaatacaccccatcactttctatcacacatacctgtgtatgcatgtatgtgatttgttcatgtatgagcatgtgtgtgtgtgaaggtagaaatatatttgaacaatatatacaaacaaaatgttttctactacaatgaaatttatatttcacataagaaagatgaataggtattgataatatgaatacatgttcgctaactttaaaaacaaactgtggagaatgacagagtagttcaggatactgtaggcagtgagttgagcactactcagtcatgaatgtggtgactgcagtattctttgaaatagtaacatttgagcaaagtccagaaaggaatgagatcctttctcaaaggtcctgaggcaagatcatagttataaccatatagaaaaagcaatgataagaagtgaagacatgacaggagagaatgcaaaaaaaaaaaaacaatgtagaaaagaaatagccaattgtttcataaagggatgtaaacattatttctcttttgttatgacagtctagactagttagtagtaaaaaacattgatttttaaatttttattatgtttatatgttctttgtcaagttatcctactgaaaattaatatgtgactattttgaccacacaaaatatcatgaccaagcagaagtactaatccatagaagtcatcagaagattacatctttcattaaaatatacacaaagaattttcactgtattttaataatgcattatctgaaactgtattcacagaattgcaagaaagtaattaattaatttgtagcctttacaacataatatccaaattaaaaattaaattatcaataataaatgctgattattttctctatttccaactgaaaaaaaaattgaatgaatttaaacacatatatgtataaaacagggtatttatcatgaatatggtttcacatgatagtggagagtgtaaaaccactaatatattgactgaaatttacagaaaaaagaaagtgtgtagccagtgcagtctgaattcaatatcctaagaaaggaaagaatgagctaagtaacataaactttgaagctcagacagaagatctgaggtaaaagactaagaaaagatattatataatatatataagatggaagaaaggggaaggaggaaagaaagaaggtaggtaagagaagggggatagcagaggatggggaaacaagatgggagagaagacaagggaaaggaacaggaccacatacagagacagtgagaggaagaactggttctttcacaggcttctgttctattcaggagaacctacaatgaatgagatgctgtcaacaaatatagatgatggcaaatcattataaattcactgttataagtagaagatatttttagagaaacccttgcaggcacaaataggcaaatctcacatgtttacctgggttaatctaaatccagtgaaatggacagatgatatcaacctccacagcagccatacaatttaaattaaaaattactcatgtccatgagtgtctttcttcttaagttgcccatatgcatgtctattgttcacaagcttctctctacacttgtgtgatctaatttcaacatactaaggcaagatgaagaaaatgagtaaatccgtcaatatcctgatttgaggtttgtgtaggcaatgcctcatgttttacacgccataatttaggtacatttttcaaaaaataattttctgtttgtttctttctgtaaaaagtattccctggactttcactaaaggtggagtttaaatgtaactcagggacgagaaaatatcacaaagaatgaatccaagtatcatgagtccctgaagtgagaagtcaagtcatgaaaactttgcatcccaaactatctttttgaatgcacacttcacttctttgttcctcaagctgtagaccagagggttcagcatgggaatgaccatggtgtaaaacacagatgtcattttgtctgtgtccatggagtgactagaggtgggctgtaagtacatgaatataattgtcccatagaaaatagacactgcagtgaagtgtgaggcacatgtggatacagcctttagatatccagcacttgacttcatctttaggatagtgacaaaaatgaatatgtacgatatccagataactaagagagcaacaaagacattgaagcttgctacataaataagaaccaactcactaacatgtctatcagagcaagagagaaccatgactgcaggaatatcacaaaaaaagtggtgaatcacatgagccccacagaaagaaagactgaaagtgtccccaatttgaatggaggcattcaggaaaccacagaaataggaacatatagaaagacacacatacacacttctagtcatagtggtagcatagtatagtggcttacacactgctgtgtatcgatcataggccattgaggccaggagataactctcaacagtagcaaaggctacaaaaaagaacatctgagtagcacagtcattgtaggaaatgaccttgtctcctataagaaggccagtcatgactgtgggggtgacagctgaggaataacaaaaatcaacaaaggacagattgcctaggaaaaagtacataggtgtatgaagtcttgagtccagcacaataaggaggatcatccccaggtttcccactagggtgatggtgtagatgagcaggaaggtgatgaaaaggggaatctgtagtcctggttcatcagtgagtcccagcagaagaaagtgtgtcacttctgtcctgttgttcatctgtgtcatctttcaatcatgatggcccacaaccagggaaaaggaggaacatgatgatgaagaagatgaactaaaatagaaaagcataaatgaatacatgtgccttttgatcaaagaatctgtacaatgagattgtctggaaaatggaacttttcccaaattgaatctgatgttctatgtatatagacagttacatataatagattttggaaattatgaatgggagtctaccaaggtttataattttgtattctgtatagtcataaatagatggggattatttaatatttgtaaaaggaatgtgtctccaaatttacatctgactacttatatctcacaatctgtgttggttacttttcaaggtctgctctagacgtgcactttagatgactactctgtgaatcctttgaatgacattatgacttgctttactggatagtaaccagagaaacatcagactttacaatagcaactaacaacataaaatatcttggggtaatgctaaccaaacaagcgaaagtcctgtattgaaagaacattgggtctttaaagaaagaatttaaagaagatacccaataatggaaagatttcccaagctcctgtatagctaggattaacattaaaaagagcaattctgctaaaagcaatctacactttcaatgcaatccctatcaaaatcccaacacaattcttcgcagaccttgaaagaacaatactaaagttatatggaacaaaaaaaaaaaacacccaggatagccaaaataaccttatacaatggagcaacttgtggtgggattagcatccctaactttaagctctatcatagagccatagtcctgaaaatagcttgatattggaacaaaaataggcatgtttcccattagaatctaattgaaaaccctgatattaacccacacacctatgaacacctgaattttgacaaggtaggtaaagttatacaatgaaacaaaagagagatccttcaacaaattttgctggcaaaactgtatgcagacatgtagaagattgcagatagatcaatatctatcaccatgtacaaaacttaagtttaaatggattaaagatctcaacataaatgcagccacactgaacctcttagaagaaaagttggagatacccttgaactaattgactaagttcaggagactgcttcctgaacttaacaccagtagcacagacattgagatagacacttaataaatgggacctcctgaaactgataaggcaaagcacacatcaagacaaaatggaagtccacagaaggggaaaagatctttaccaatcccacatacgacagagggctgatttccaaaatatacaatgaacactaaaagctagccaccaaaacaccaaataatccaatttaaaaatgtggtgcagaactaaatagagaattcccaatacaggaatccaaaaatgcctgaaagacacttaagtaagtgttaaacacccttagccatcagtgaaataaaactcaaaaccattctcagattccatcttacactggccagaatggctaaaatcaaaaacaccaatgacagtctatgctggagaggatgtggaaaaagaggaattctcctccattgctggtgggagtgtaaacttgtaaggcaactttggaaatcagtatggttgtttctcagtaaaatgggaatcagtctacctcaagatccaacaattcctccattaggcatgcatatacccaaagaatgcacattcatgcaacaagggcatatgttcagttatgctcatggtaacattatttgtaatatccagaacctggaagcaacctagatgcccctcaaccaaaaatggttggagaaaatgtggtacatttaaacaatgaagtattactcaacagaaaaaaaaaacaaaaaaaaaaacaaagaaatcttgaaattcgcaggcaaatgaatggaagtggaagaaaccatcctgagtgacaaacacaatcacagaaaaacaagtcgggtatgtcctcactcatatatggatattacccatggaggagaggactaccagtctataatccacaccaccagagaaactaggaaagaaggaataatgcatggtcctcagaagaaggggagggggacaagaaatcctgagcaaattgggagcacggagggagagaggagagaagtaggaaggggagagggtaaaaggggaggagaaaaattttaaaaatgaaattgaataatttatacatattactaaaatatgagattgtagtctgtgctttcagtctatgattttatttaaccttactgatgctcaagtactagcattcgaccagaattttaattaaattgaaaacaatattaaacataattacatggctgccttggcaagaactcaacattgtttgagtaacagagttctatttctaagcacacatttcttttagagtcttttgccacagagcacaggggccaggaataaagtgtcctataaaataagtattttggcttgccactaagttcattgtccattttctttatctgtattttggacactgttctaagcatacatattcagaaagtgtgtgatttctcattcttttgtgaatccctcctcctcttccttaatggagcagtttaaaaaccatccttgctgaacagagaacatttcataggcataactcaaaatatatgactttctctctcccctttctccttctcctgactacagaacctgctagctttgaaacttacctgtgtttctctcaaactctaataaaattattctcaaacatcattctgagtttatttctaaagtattttactaatgagaataagagatgaacaggggatgctggatatctaggtaacagatgtagtatatctctatgtgcagtagatatgttgggataactcaggtgacagtagtcacttcagcttgatgcagctctgatagctgcaggcagataatcataagctgcatcacacagagagctttggtccattcactgtgtaggattcattactccttactaacctgcctgacccctgaaaagtaaacaaattaatcagaccaacttgggatatttctgtgagaagacaaaaagacagtaaaatgttgatattaatcacatccagggattgtgagctttcatgcgttgtttggataggagagtgatcttctggtttgtgctgatttgttgttcatggacactgggaagcagggcttcacctcagatgatattgaccagtccctcctcatgttgtctttcctcctgcaaaagcaccactgagtagttatgctctccaggtgctcctgcttcctctgaaaacactgattgctgctcctacaattacccaggacccagtcttccttgaattcttattctaaaagcatattttcatttggtgaatgtctttttccatcaacttattctttctgccatcctgttacagtatgacaaagacaccaataccaaaataaaattgacagtttatggttctctctgtccctcacagattttttacaagtgccttctactttataaaatcatttgatatgatgtggctgtcataataacaatgtttcaacttgtatatttgttttgtttccttgggtactgaggtttattttcccagttaggctagtcttcaattcctagtatgaagctagacatgtgcctcagctttcaaaatggttgcaaaaagggcagatatttttgcttgaattgaagcctttgaaagtatatctacctaagacaaacacttaacacttattccccaccataaatctcctgaaattctgaatattttagggtataaacttattatttgagactagtttcagaaaatactgtagtctacaataataaaagatttgcaccagggtttacaattaggtattattactattaattctaggctataaacatgtaagaagttaccagtttttctaaagttatttcttagaaatattcaaggtatttttagactaatatctgcattaacctatattttccacactattttaatgtcatggtcatctgtatataattttagagaaacttaaaatgtatatagagaatcatacagtatttttgaaatttcaaaaagatcagtttattctcttgttttttgcatgcctttttctgcaataatagtaaaataaataggaaatagataaaattcacagatattcagtgtgtaatttttcttgcaagattcatagacatgatgtgttaagagaatacctaaattccctaaaacgtaacttttttacattcatactataaacccaattagttttttttttaagaaactgttttcatcacccctttctcttttaatatcattcacagtaaggtttactgcacaatttactttacttaagtttcaagtctcactgacaatagttatgcaatatgtaaggccatcagttatttgaaagaaagaaagatgactccaacagtaggtatgagatcatcaagtcagccacacaatgctggtcacacagatctttctaaggtagcgactgaacatgatgtctgagacactgaaaaactgaggaaagaggaataatatgcataatacttcttaaactctataaagtattcctctttcaaggaagagccacacacttgccttacttacaaaaccaaagtattaaaattgcatatcgcacaaaatttatcaattgtgaattaagaaaaacatgacaggtctacgtgatattataccaattaaaagtctgtcaatatatctttttttacctttgagtgtttttccttaaccatgcatgaagtctgactggacatcttcagtcatgaggtggcaatgaaagagataacagtgaatcccattcaaatgcatagatgaacactttggaaacatgacatcaagcatgttttatttaagaagctaatgtatgaagagcaagaaacactgtgtagacttggatgtccctagagatttcttttatgggaataccagcaactccaatctcctttctaggaaagaagcaattaaaactgtatgtacccatgtgcctatggagagtacttctgactgaactcagagttgaaataagaaagttgtgaagttggcattatgctagcctgccctgccacctggcataacacattcaggcagcaacctgatcaaccaacgtttccacgattactagtctgcattcaggtgcaaaggaagcctttaaaagacccctgcccacttactctactctctttcccactctctttcttgctgttcccctggggaacaggacttttcatgtctccctcttctcttctgtcttctttctctctgtgtgtctctatggttctttacctcttttctctttcctctccccaccccattcccttcctaacaaaacttctcactacgctctgtctgcctggcatgtttgtcctcctccttggttaccctcacctgtcatggaatctgccaagctttccctagtgctttattgtatcaagaacttagcagcttctatatatttgctttctatcatgaggaaatagagcaaaaaacaatgtccaacagagaaggtacactcacataacttaatatcaccaagttgttagcaatttgaatttgaacacccaagcttctacatctgagaaataaatacctcttgtctatacattttatcatttaaggtgctatgtcataatacagataaaccatcacatcatgaatgatacttgttaagtttttgtcaaacataatgtgccttgtttctcctgatgtcaaatgtggaagagaaaatgaggtaaggaataagattaccattttcacttctggctatattgctgaggataataaaaccagtccaatcttgtgagtgaaagatatggaaaccaataggataattgttttagactgcacttctacttgagaaaggtatgctacttaggaaacttggcaaccatacttaagtggcattcattcaaacactcttaacacagtgtaaaatgtcatactgttgtctcagagctagagagatatctttaagtcttccttttgtcagtgattgctctgccagtttcccttgaactctgcatatagcttttagatgtaaatgaatcatgaattctcatgggtactaatgaaggtccaaccctgaaaagtcagagttgccaggctccaaaacttagtagcatatattatttaaaacaaaaaaaaataaaattatggtgactgtgcttcactgaattacgttttttaaattaactaaatctactcatttattattataccccatttcccctcccttctttctccccattccatctcccaaacctcctctctccctcacttcaaatctactcctcctcgtttttgttcagaaatgggcagtcctcccatgggtgttatcagagcatggtacagcaagttgaggtagcactaagctcctccgatcatattaagccttggcaatgcaaactagggtgaggcataggctcccaaaaccctgccatagcctcagtgacagaccccattctactgctaggagtcctacaaagtcatctcccatgactctacaagattttaaataaatgtctttcattttgtatgttgaaattcacttcaaaaatttgaaactttcctatatttagtcaatttaatttgatcgtatccactcgacacctccctccaaaatcctgcaagccctagctaacatgtatatttctgtatatttccctaatacatatcaattttaattaaaaaaataatatttacttacattgcattttccccaccaggatccaattcctcccacaatccacccttacctaggcaaattgctcatttctttcatatatacataaatgattctgagtccatttagtgtggcttttgtttatctaatttcaggtctgaccagtttaataaccaattaggggtctcatctgtatataagctaattctccctctctcagtccttagttgcctgtagaccttgccttggagatgagattttttccccttttgacatagcatttgtattgatattgccatttgtttgggtctagttgagcagcattgttgttgatgtaacaaaggtgctgctttcatgccatttccttttttaaaattttattatctgaggccagttagtactattcatagatgtacaactgtgaggttttgtttttgaattaaaaacatatcaataaacaccttccaaagaaagtagggttgttaaatgtgtcccttttggaaatgagcccttcacagtcacttatttgcacttagactagttgtagtcacctctaaaagcctctgcttcaaaaagaagcttctttatgaggagttagagccacaataatccattggtgtaagggtaagtattctgatgtcagttggaatattttactcagttgtggcatttctcaaatacacatatcaattatttacatgatatatgtaacatattaatgatatgtaagattttatttaagcaatatgctacatgccactgaattagacatcaattcttagtaaaactttttagagggtttgatgttctacttgataaagggaattccaggacataattaggaatagaagtaacaagtggaaacttagtgagatggtacaaaataatgtttcagtaggacaggaaatttggaatgtctcttgaaataggctgaatgtagctgcagttgggaattattatgtgtgattcactatcataacacatgatacaatgatcaatgtatgggttaaactaaatttccgatgtatgctactcatttatcagttatttatggagaagctatactggcaaagacttctgacataataaagtatcacaatttttatcagtatgtgttagccatacacaaaaggtttcttctagcattttatacatacataacaggttattttaagctattatgtaattcatcccatcactttctgtcacacatacatgtgcatgagtgtatgagattcatctatgtatgggcatgtgtgtgtttgtgaaagtagaaaaatatttgaaaattatattgaaacaaaatattttctactctaataaaatttatattccacatgataaagattagtaagtattgataatgtgaatacatagtctgtgaattataataaaactattgagaatgacattcaagggcaggacacttaggcagtgagctgagcacaattcatccatgaaggtggtgacagcaggattctttgacacagtaccatttaagcaaagtcctgaaaggaatgagatactttctcaatggtactgaggcatgatcatacttgtaacaatatagagcaagcaatgataagactgaagacgtgataagacagaatgcaaataaaccgacgtagaaaagaaatagctagctctttcataaaggaacatacatattatcactcttttattacaacagtctagactatttagaaatagataaaaatattgaattttaaatttctattccatttgtatgttctctgtcaaggtgtcctactgaaaagcaaaatgtgaacatattgaccacatgaaagatcatcatcaagtagaagtactaattcacaggaaataacaaaagagtacatctttcattaaaatatgcaatcagaatattcagtgcaatttaattatgcatcttctgaaactggattcctagaatgtcaatgaagttaataagtaatatgtagctttttcaccattatatccaaagtaaaaattaaactatcaataataaatgctgctggaactccgccgtgggaggggaaccagcagccgtggctgctcgggccagtggggtctgttgtcgccatggaatacctgggggatgagatgaccctgaccttctccagcacgtccatgttccccttttttgacattgcccactacctggtgtcggtgatggcgctgaatcagcatccagcggcagtggcgtggaataatctcctgtccagtggttgagtgcaatgttccattgctttggtggaggaattttatcctgtatagtgcttgcagagcctccgttgaagtttcttagaaaccacactaatattttactggcttcttcaatctggtatattgtatttttttgccctcatgacctagtttcccagggctattcatatctacctattcaacttctggctgtgggaatgaaggaagttgaccagaacttggaaaatagtatggagtcacacatgctaatagctattacagaaatggctggatagtcatgatagctgttggatgggcccgaggggcaggtggtgttattgtcacatcttatgtagagttgctaaaaggagattggaaacctccttttaggtgatgagtgggtgaagttgtcattcccttccaaggtaacactgctggggtcaatcatcttcactttacagcacaccaatcatctggcaatgacaaagcatgatctcatgttcctttataccatgtttctcgtggccataaagaagaccatgatgataacaaaggataccactgtgactcttgctccctttgaggacaccttgaaccggatggtgtttggctggcagcagcagttttcactgagtgaaaagaaaccgcaatcgaaactgtcttccaatggcactgcctcgtcagtgtccaagcccaccacagaggattcaggctcttctaagaggcatgccaagaaagaagactgacaattttacctgtgcttgggaggcgaaaagggagagttatttatagagtatgctatgtaaatggtatgctatgtaaatgatgtgaaataagcctatctgtaaggatagaggagacaaaaaggaagaaacaccttatttcagggacacggctctgttaattgttaactcttggagtcacaagtggatcatgtgaatttatttttctggtataagagattctcctagttacttgaatagttttatattgataaaatgataatttttcaaatgttagaaaaagttcacttgttactgcaaaattctaaggctttaacacttataaaattcagtggttttttttcactttttgaattattctaattgtgttttaattctacagaattaaacttttacttcatatttgcagtacaattcctgtatatagaagacaattactatttaattttgaacatgaagaactttccctaaataatttttaactgcaaataaactgatagtgtatatttggtgtataaatttgtttttataccttacccacattaaaaatacctgaaatttaatttattttagtttcaagtattatttttcagtgggttaatttgagtcttagtttgaagttttttttcatgctcttgttttaaaaactactttcttctcagaaaagcagggttacaatctgtgtgtatctttttctttctgcaataccagtctcactctgtagccctaggctggcctcagatatcctcctgcctctgcctcccaagtactgggattacaggcacgggccaccatgccagactaggggtgaggttttggttgttagtaatcctatgttttatcctgtgtttggaactgggttgtctctgttctttccccatgtcaacaagtggagagatttcgagtatcaatgttcttcctgactcagttgttcagaatatgctggtgcatgtcccagtgactcaacaaaaagtactgtcacagctgaaaacctctctgtctgtacctctcttctagtgagcactgcttcagggcttcatttgactatctcttgtgagttcaaatatgggtaactttgtttaattggcatgcacatgcattgtaagttctatcttaaatgaaaactgctttcatgtggaaatgctcagccctcatgagaattgcctttgcacatgtggtctgaaccatagagcctagcctcacctggtaaactgcttgagtgtggccatacaacattaaatctggtttctcattgacaaaataaaaagcaaacaaggaaatgtactgcatgatagatttatttgctttatttggttttaaaagtcctgttacaacattacaattctgtggtatgactttataccaagaattggaaactgccacctatattagatatttctggatggctgagaagcacttaaatgacattcaagatgtaaagctttccttacttcttctgcttaaaacaaggatttgaggtagggcacttttgataaccatggtattagaaaatgcttatttttaacgttgtaatggaaagcactaaattgaattttgtattatatatttgagaatctgtagtcaaaaactttgcaaaatgaacatgttattatttgtcagttctgaagtttcaatttagctgtagttacaatagaatcttgtttgacatttgtgttaaaacaaattcattaaaataagtacattagcaaaaataataataataataataataataataataataataataataaatgctgctggagtattttctgtgttgcaaaggaaaacaaaaacaaaattgaatgaatttaaacacacataagtataaagcaggatatctattatgattatggtttcatatgatagtggagtgtgtgtaacccgtactatgttagtgaaatctatagaatcaagaacgtaagtaggcaatgcattctgatttcaatatcctaagaaagagaagactgagctgggtaacataaattttgaagctcagatataggttctgatgtcaaaaaataagaaaagatatatattttatataaaagagggtagaacggggatggaggaaaaagagaaagaaggtagaaaagagaatgggaatagaagaggatggggaaagacgatgggagagaagacaagggaaaagaatagaaccacccacagagacattgagaggaagacctgattctttctctggcttctgttctattgaagagagcctaccatgaatgagaggctgtcaatacacattgatgagggcaaacctttataaattctctgctgcaagtagaagataattttagagaaaccctgtcaggtgcaaataggcaactgtcctatatttacctgggttaatctgaaatccagttgaattaaaagattatatcatcctcaagagcagccatgttcaagtaaaataaaaaatgaatcgtgtccatgagtgtctttcttcttaagttgtccatatgcatgtctgtagttcacaagctattctctaaacttatgtactttaatttcaacatgctagggtgagatgaagaaaaatgagtatattcatcaatatccagattgaaggtttgtgttggcaacccatgatgttttacacacaataattcaggtaactgtttctggaaataagtttttctgtacctctttttctgcaaaagaaatgttttctggacttgcacaaaagttagagtttataataacccaggaacaagaaaacatcagaaagaataaatcgaagtatcatgagtctctgaagtgaaaaatcaaagtcatgaagactttacatcccaaaatatctttttgaatgcatacttcacttctttgttcctcaagctgtagaccaaagggttcagcatgggaatgaccatggtgtaaaacacagatgtcattttgtcagtgtccatggagtgactggagctgggttgcaagtacatgaatatacttgtcccatagaaaatagataccacactgaagtgtgaggcacatgtggatacagcctttcgatatccagcacttgacttcatctttagaatagtgacaaaaatgaatatgtatgacatccagataactaggagagcaaaaaatacattgaagcttgctacataaacaagaaccaactcactgatatgtctgtcagagcaagagagaaccataactgctggaatatcacaaaaaaagtgatgaatcacatgagccccacagaaagaaagactgaaagtgtccccaatgtgaatggaggcattcaggaaaccaccgaaataggaacatatagaaagacacacatacacacttctagtcatagttagcatagtgtagcagcttacacattgttttgtgtcaatcataggtcattgtggacaggacataattctcaacagtagcaaaggctacaaaaaagaatatctgggtagcccagccattgtagaaaatgaccttgtttcctataagaaggccagtcatggctgtgggcgttacagctgatgaataacaaaaatcaacaaagggcagattgcctaggcaaaagtatataggtatatgaagtcttgagtccagcacaataaggaggatcatccccaggtttcccactagggtaatggtgtagatgaggaggacggtgatgaaaaggggaatctgtagtcctggttcatcagtgagacccagcagaagaaagtgtgtcacttctgtcctgttcttcatcattgtcatctttcactcataagatggtccatagccatgggtaaagaggaccatgatgatgaagaaagtaaaatggaaaagcataagtgattacatgtgccttttgatcaaaaaatctgtacaatgagattgtctggaaaatggaacttccccaaatcaaatctgatgttttatatatacagacagtaatatataatagattttgaagattattaatggaggtctacccaattttataattttgtattctgtatagtcataaatagatgggaactatttaataatgataaaagcaatgtgtggatgatctccaaatttacttgttacactttatatctcattttctctattggtcacttttcaaggaatgctctagatagccactataggtgaagacgctgtgaatcatttcatggaattagaacttgctttgatgtaagttacggcacacaagaaactgagtaatttcttcatattgttaaatttgaaatgctagtctgtgattttttttaattatttctgattctcaagtatcaaaattaagtcagacttttatttaaaatgaaaataacattaaacatacttacatggctgccttggcaagaactcaacaatgtttgagttacaaagttctgtttatgttccaaagcacacatttcttttacaggcttttgtcctagggcacaggggctaggaattaagtgccctataaaataagtattttggcttgccactaagttcattgtccattttctttatctgtattttggacactgttctaagcatacatattcagaaagtgtgtgatttctcattcttttgtgaatccctcctcctcttccttaatggagcagcttaaaaactatcattgctgaaaagagaacattttatagacataacccaaaatgtatgactttctctatccccttcctccatctcctgactacagcacctgctagctttgaaacttacctgtgtttctctcaaactctaaaattattctcaaacatcattctgagtttatttctataatattttactaatgagaataagagctgaacaggggattctggatatctaggtaagagatgtagtatatctctatgtacagtaggtatggtgggataactcaggtgacactagccacttcagcttgatgcagttctgatagctagctgcaggcagataatcataaactacatcatacaaagagctttggtcccttcactctacaggactcattctgttcttactaacttccctgactctggaagaaaacaaagtaatcgaacaaactttggatactactgtgagaagacaaaatgctaataaaatgctaatgttgatcacatccaggtattgttagttttcatgttatgtttggataggtgagtgttctggtttgtgctgatttgttgttcatggacactgggaagcagggcttcattgcagatgatattgacctgtccctcctcatgtctttcctccttcagtagcatcactgagtatctatgctctccactgtgtccctgctccctctgaagccactggttgctgctgctacaattcccaggatccagtttccttgaaaagcatttttcatttagtaaatttctactttccttcagcttacttgttctttcatcctgtcacaggatactaaagttacctataccaaaataaaattgaatgcttatggtactctctgtctcttacaaatcttttagaagtaccttctattttatgaaaacatttgatatgatgtggctatcaacaatgtttcaacttctatacttgttttgtttccttggatattgagttttattttactacttattttgctccttaattcctaagatgaacataccatagttcttcatgctttctaaatttcttcaaaatgggcaggtttttttttttttttgcttgaattgaagcctttgaaaggacatctgcctaagacaaacactcattccccaccagaaatctactgaaattctgaatatttcaggttatacagctattatttagactactttcagaaaatactatagtctacaactaatatgaggcttgcacaagaatgtataataggtattaataatattgacttggtaggtattattgaagacactcaacatttcagaagttaccagttgttctaaagttattgccttactttgaaaaagttaagttatttttaagcctcatctcttcagtaatcccataatttccatactttttaaatataatgttcatctgtatatgatgcgaagggaagtgtttaaattctttagtgagtcatatagcattttcgaaatttccaaacggtcaggtttcacttatgtttttttatgctttttttttctgcaacaatagtaacataattaggaaatagaaaaaatcacagatattcagtgtgtcttgccttggttcttacaagattcatagacatgatatgttaagagaatacctaagtttcctaaaatggaactttttgcattcatacctcatacccaattagttttataaagaaactgtttgcatcatcccctttacttttaatattatttacagtaagtgttaccaccaaactcacttcccatacatttcaagtctcactgaaaaagtttatgcaatatataaggccatcagtcctttgaaagaaagaaggataactccaacattaagtatgagatcatcaagttagccacagaatgctggttacatggatcttttctgttagtgattgaatattttcatgcagtctgagacattcaagaagagaggaaagagaaatatgaatatgaatctacttcttaatctctataaagtcatcctctttcaaagaagggtcactcacttgccttatttatagatcaaaaactagaaaattgcatatcttactaaatatatcatttctaagtgaaggaaaggatgagagggctacatgatatcataccaattatagggtctatcattatagcttttaccactgaatattgttccttacccatgcatgaagtctgacaggaaatcttcattcatgaggtggccatgaaagagataacagttatggtgtccatgccacaactaagtccgagtacggggaaaatgcctgtagatttagttaaacacagagacatctggccacttgtgttatgtgcgtcttttcatctttattcatctgctgttctccagggagaaagcagccttatatacccttacagccttgtggaaaaatgccaggtgtcagagcttgtggaagaagagctcctgttttaccaggtgtagtggggcaaggatgaggctgtaagacaggactagaacacaggatccacctttgcttattggctgacaagaaactcacagaaaccctgtaggggctgggatccaacatctccccctaattaatatataaattagtgcctgtcttgggtgactagcatgttgatgtcacctttacccgtcaatggagaaatcacccaagctgcatgactctcctgtcttaagttggctggcatccccttggtctcacctgtcattggctgcctaatttttctgtagactcaaccatagttgagctgaaggattcgctacagttattgagtgacaaattgactctaggcttgtgtagcaccgcagcaccttggctaaatgaaacatatgataacaaatcctatggctgagaggcccagagataaggacccaggccattctttgactaaacagcctgccatctgtaataccctaaggaggatttctccagaggatgggggaaatcaggtctcatttatcctaataatttgattgaccaattgatgagcataatttgttgatttaaactttctacctggactgttatttatggaactctgagtgctaagagcctctgttacttcccctatcagtttatccactatgctggctatagttacagactatgagatggcaatcccaaatacaatgactgctgtagcagcaatagcaatagttgcaatcaccccaacagtgatgccaaagtctcttttttcatccatcaacttgcaagatggcccacctgttgagaaactggaactctggaacccactgcctcctttctatcatgaactgtagattcaatgaaattaagggtcaggaacactgtttcagtgtgtttcactcgaactggcttgggcaggctccccggtctcaggttccattttctctgctccatgcatctcaacaaatgttctggcagccatctcacttttttcttttcctgcaagaaaatacaaacattccctcaaccccaaattagggcaggattgggtcttctccattgtctaatgtattatgtagagactgagaacattactccccctttctttaatctttagaagttagttttcaaagagccatgagcatgctccacaactcctcatccccgagaattacaaggaacaccttatttgtgatcaattttctcctgagtacaaaatagctgaaatggcttactagaatacccaaatccaatatctgttctttatcacttttggaactacacaatgacttatcatatgtttagaaacctgaatacctatcaactgccatgtgcacgtattttaacttgccaaattctgcaatatgagtaacgtccatttgtcataggcttcgagggagggttcactgccacattagccacaggtagatactatgggcacacttcgaagtgtttgacgatttggggagcagtctctctggttacgccaaattgttttcttaaacttttgttgttttggtgatgaaaattctgagactacagagttttctctgacacaaatagatcactttgccaatctgttgactcattccctccagccaatgtgccgggaaggtctcaatgagctcccatgtcacccacaaaacatggcaattttcttctttagttaactgtctatgtgaattgaattagaatcttaattaaagtttttaaatctccagtaaatgtcctttaaaaaggatgtaaccattgaatatttctcaacaacttctgaaaatcacttaaagattgcaaactaatctctaatttttaaggcttaatttctttaggctataacatatgtcccaaaacaacttttaaaaattatgtgaagtttgtcagtagtcttttctaatccaacctataaagctctcaatagctgccaaagtcttatttgtatcttagccaacaggacctaatttgcatctatattgactccttcccaggtggagatcaaacaagggcagatattttgaggctttttctcaaaaccctttttcttaatcataaattaattactattttttagattttcttttttaactaataaaatttttatgaggccctttgtaacctctcttttgttaaacctacaaaattatctgtatagatttcttttgctcttaagtcaaagccatagcctttttctattttttcaccaactggctctgagggcttcaattgccaatcttttctagttaagaccttgactgtttgattggatgctctttttaactatgtttaaaggaattttggtagccttttaacactatccgaagccatctaaatatccctttactcatatccaaggcaatttaagcagttccttttgtcaaagttcaggcactcacaatcacatttcatacataccagtgtggccacaccatacacacagaacatgcacacatctctctcctctccttttgcctaggttatgattagtttgttgaaatgaaacttctttaattgaaatctcttgtagcacaatatctatgaccaatccttgaattaagagcatcccaaattcgaataaatccaaatttgtctatgttgtctttcttgttccacaaggtcttaaaacagtttttgattagctgtattaatagtattttctatgcatttggatggatgtcagccatggtagcagctctcaaggctgtaagtttcttaggtttttgccttgaccttccttgcctttccctctgccccgctgtacaacatctgtgactgctttcgtttcctgcatctcgggcacaaacctggttccctattttctcctctggtgggactctgtctaacccggtgcccttcctgaccacatctaaagcaacctctaggaggcattgtgactttcttcctctttcttcctttctttctctgtaggcataacatatttttaactgaagttcctgcaaggcagctgcctttgctaatccctgagtgtaagctgttccgatatctaaacaaatcttcatgaacttgtctatgtcagctttcttcctgtgataccttggcacagcctggcatgctgtactagcattctcataaactagctgtttcaatcaaaggtccaacacctgtgtctctatctttttttttttttttcagtaatgtctgcattggcctagagtcaaattctgaaataactccctaggtccctgctctatataacaaataatctcctcatgacccgcaggccttcgctatctgcttccaaattcctagggcaatccctatagcatctgggtgaaaaccgatgttgatgtataatgaacatatgtgctagtaagatccttgaactgcttaaatggtattggcgtctgcattttgtttgtttctctgagaatatttgtgctcctatataggaaatgtccgaaatccctgagcatctctttctatccactgcttgtctaatagtagcttgcatagaagacatatgacctgctgtggctgccatgccaccactcaaaggatatctgttccttaggctgacccatgcttgttgctttcacagacaaaggaacatttctctgatctggggaaacctgcaaatttcttatctcctgtgagagtgattccactaaacctttcaagcctcttagttcctgctgaattttaccactgggattctgcctctctgtattcccagtttaaaatgaaggaggtgaagcctctccatcctgatacttggcaactctatactcatcccaatcactctgccctgtatatttttgttcatctagtaggtctctggtgtccattacattgctaaccagttcaggcacagatatttcatgctgttctgcatgtatgcgtggtcacacctttgtttcccaaaggcctggggcgactctgataaacctgaagtgatggcttctatgaaaaggaaggatccttttaaacttttaaactctgaaattttctgcacttgtcttttgctttacttccactctcctatctattaaaatataccaagaaaatatacaatcatgtaactaattattctctgtctcatatctctaagtacatacatttttactctcaaggttaactcacttctctttatcatctggctaatattcctggtcattgccatttataaccaatctcatttaaatgaaaatatacattcataagcaatatttaggaatgtgggtgttgttctttccaaactgcttcctgcttaatgggggtgctgaaataccatggggatgccaagaaaaaccagaaatcctgtctgtagtggtctgtgactacatcatcccaggtctcttcaatattggatcacctggccattgcttcagggggttttgcttcatcaaaccatgttagtctgaaaggaatatacagcttttcattttctgtggaaacaaaagcagaaaatcttttcctaagaaacctgtccttatatttagaagtcaagtcatttttaaatacataagttggattaatttagcagcatttattatcaaatgtctgttagcagctattgctctttccttatcaattaaacaattcaaagccagcacaatagcatacagcatccagactctctctgcattttttgcctttcattttctcttcaaaactttactttttattttcttttttaaaacactgtgtattttttactttttattttctttttaaaactttacttttcattttctatttttacattatttttacttttcataacaattccattaactgcagttttctttttgagacagggcttctctgtttccaatccaactctctgaggagttgaggcacccattttccaatacctttcctaatccatcactctgaggagcccaggtacccttccagtatccttaccagtcaccttcataaaacttaattgctggctactcttccaaggacaatcgctcaggatccccgttctttccagatcttggtggggcctccacttgtgctgtctgtgccacgattaagtctgaatattgggggaaagcctggagatttagttaaacacagagatggctggccgcttgtgctatgtgtgtctttccatctttattcatctgctgacttccaaggagagagaagccttacagcatagtggaaaaaccccaggtgtaagagcttgtggaagaagagctaattgtatggagccgaagattgggctattagaggatttctcgggtccaaagctcctgagctccagtctacattgtaatgcagatgctagctgatttactgttgaatttcatagcctcagtggagaatttccccgagttttgcatctctgaagaactaagcatttgaataggcctgcatcagggtggagggctaagtgtacctgacaactgaggacagagatggttaggaggtattgggagcagaggtcaaaaggaggagagataatagagaaattggttgataaggtctagggagatgagagagaaatggcctcctggtcagggaagtatggttagattacagccagtaagatactaaataaaggagagactccagttttgcagcatggaactgagagctctctaaagcctgtgtctgggctttatcaccgttggggtgcaaggaattttcaagtccaggctcccccactcaggccgaacttcgtggcttccatggtttgggactgagacatgctgagacacaacaactaatgcatgaagaacaagaaaaattggttagactgggacatccctagagatttttttataggaataccagaaaatccccatcttcttttaaggaaagaagcaattaaaactgtgtctactcctatgcctgtgggaagtgcttctgattgaactcagagagtaattaatgacagtgaaatcaggagtcatgaagttgggagaaaaggtgagagtcactgggataggtgggagactggtagtggtggatgtatatgatcaaaatgcattacatcaataaaagaaattatcacataatcaattaaacatcatggaaaaacagggcaggctggttattctcaatgttcacttgggttaatattacaggcacgtgtccttttaaggtgtttccattgatgcatactatctatattccagagaccacatacttttgtgtaatgtgtcttgcatatgttctacacaatacctacaccaatatgtctgagattatcttatacaagttgtaaaaacctaaaataattctaaagggccaaaatgagggtcttttaatcaatggacaagtggagatgtaatgaaactttagagaggattcccttttctgcatgaaatgttctagtgttcaattggtctcagtgagcatgaaagacactcaaatacatgtgttttgcattgttaatatgcttcagtattatttatcagctaaagaataaaattcaggaagctagaaagaacacttattgttcctacaaagaatcgaactttgtttcccagcatacatcatacatgtcagagggcagacagctgacctgtcactccacctcaaggggatctgatgctattggtctctgggcacttgcattcatatatgaccactccccaaccccctacacacacacaaacacacacacacacacacacacacacacacacacacacacacacacacacaaatacacacatacatatggattcacgaactcttaaaattattaaaacgatccttgaaaaataaaatgggtttcaaatgtaggttacaatatgatttaaaaattctggtggaagtaactatgaagatcaatttaaaagtaagtactgtcatagtatttctagattaaggtttttccaatatagttcaaataatgcaaagtcataattattatcctgttagtggcaataaaatacatcaagatatcatttattatcaaagagcataaagttggaagaaatataagtgaaagaggtgttgggttgattactacttcaatttctttgttgttctataattttcaatagcattgactttccttaatctggcacattctgactcacttgcatctatagaattttcatatttgatagccagaaaagcaaatttttcatagcaaataaatcttctattagttctgattgtgttcatatccctttgtaagcagagtttgactatgagattgggatttaaggagcatattgctagagatgaactcaaccaagatgcttttctggtgtaaataggcttggctttctaaatggtaccaagagctaatgaatctatgttcatcaagaaagagggaatggcaaaacaaaatgctattttgcaacattaaacgataaaatatcatcattggacactgaatataaagcatgtgaataaaatggattatatcaaggtatgtgttataacctattgcccatggaggaatactctgtcagcacagaatcagggaggagggcctaagacctcccccaaattatgtgagagacattgatgatcccccatggcaggcctcaccctccctgggttgtagatggttggtgggatagagaggtcggtgacggttaggggaggatggaagggagagggtactgtgattgatatataaaatatgatggtttccaaattaaataaataaattttaaaaagaaatacatggtaaaatttgaaataatgtatcagtttaaaagttcatgtactgaaggctaagactcaagatgacttcattaataaatgagacctttaggagaaataattaataagtgaagtaaccttcagtgtggcagtgtgtgttcatctcataggagacaatgaagccatttccacaccattaaggatcagtgatcacgtacaaggctattagggagttagcctagactattttgtgtgtttccttcttccacttaataaggattcagaattcatacctgtgagaacagtaaggactcaggcatcatgttggcctgctcctgtcacctggcagaaagcgttcaggcagtaccctggtcagcccaggattccatgactggtagtctgcatgcaggtgaaaagaactgcttttaaagaaagacaccgcgccgggcattggtggcgcacgcctttaatcccagcactcgggaggcagaggcccactcacactcttctctttcccactctctcttctctttcccaatctctctcccgctgttcccctggggcagacagaacatttcctatcatatcatgaataatacttttgaaatatttgccaaacataattgccttgttactcccgatgtcatgtgtggaagacaaagtgagatagggaatatgatacaattttaactcctggatatgttgctgaggataatgaaaccagtgcaatcttgtgagtggctgctgtagaaaccaataggatagtatatttagattatacttccacttgaacatgcaatgctacttgggaaacttggtatccatactttacggccattcatccaaacactgttaaaccagtgtaaaatagcatactgatctctctgagctagatatatttctttaagtgttcattttttcattgctctactaactcccattgcacgctgcctattgctttcagatgtcaatgaaccatacattctcatgggtactaatgttgtccaacatgaaaattcgggcttgcccgtgtccaaaactgagtaccacttattatttaaaacaaaaataaaattatggtgactgtgcttcattgaatgcacatgatttttattaactaaatttattcattaattgttttacccaagtttctccccttcctcctgccattccctcacccaaacctcctctctgccatgagtgtcatcagagcatggtatatcaagtttggtaggactaacctccccctctcatattaaggtttcataaggcaaccctgtattcggcttaggcttccaaaatcctgtaaaagcctcactgatgagttccattaattctgcttggaaccgtacaaaactcacatgaatttttaaataaatttcattaattttgaatattgaaattcacctcaaaacattgtaactttcctgtattcagccaatgtaaatttggtgatatccatttacacatgttcctacaaaatccccaagcactagcaaacatgtgtatttttctaattcatatcaaacttaattgacaaaataatgaatgttatattacattgcatcctcccctcctagctccaactcctcccacatacccctcacccagacaaattaatggtttctttcatatatatatatatatatatatatatatatatatatatgctaataaagcttgtgagttcatttagtttgctttgtgtttaatttcaggtctaaacagtttatattggataactaattatggttgtcatacctggggaagttaattctccctctctcagtcattacttgctggcagtactcttccatgggatgagatttgttccccttttgcatagtatttgtattgatattgccatttgtttgggtgtctttgggcagcattattgttgatgcatcatgggtgttgctttcctgtcatttcctttgtaaaaattttattaacagaggccatttagtactatttataagtgtgcaattgcaaagtttcatacttagaatgaaaaacatatcaatagacaccctccaaagaaagttaggttattacaggtgtcccatttggaaatgagccctccagagtcacttccctgcacttacaccagttgtaacatctctaacagtctctgcttcaaacaagaagcttcattatgaggacttagaggacacactaatctaagggtgtaggggaaagtatttatatgtcagttgaaatattttacttagttgtgggatttcgcaaatactaatatcaattacttacatgatatatttaacatattaatgatatttaacatttatttaatcgatatgctacatgacacttaattaaacatcaattcttagtaaaacttattagagggtctgatgttctacttggtagagggaatcccaggacataattaggaatagaagtaacaagtggaaatttagtgagaacatacaaaataatgtttcagtagaacaggaaattagcaatgtctcttgacgtatgctgaatgtagatgcagttggtaattattgtgtgtgatttactatcataacacatgatacaatgattcaaaatatgggttaagctaaattccccatatatgctactcattcatcagttatttttagataagctatactggcaaagacttctgacataatagaaaacatcacaatttttatcagtatgtgtaaattatacaaaaaaggtctcttttagaattttatacatacacacaagtgttttaagctactgtttaattcatctgtcactttctatcacaaatacatgtgtatgcatatatgtggcttctgtgtatatgagcatgtgtgtatgaaagtagaaaaatatttgaacaatatattcaaacaaaatattttgtgctcccatgaaatttatattccacataagaaagattaataggtattgacaatgtgaatacatagtcttcgctaacaaaactattgagaatgacattcgagggcaggacactataggcagtgagttgagcacaactcagtcatgaaggtagtgagagcaggattctttgacacaataacatttgagcaaagtcctgaaaggaatgagatcctttctcaaaggtcctgaggcatgaacatagttgtaacaataaacagcaagcaacaatgagactgaagacatgataagagagaatgcaaataaaccaatgtagaaaagaaatagccagctctttcataaaggaaaaaacacattatctctcttttgttataacagtctagactatttagtaatagataaaaatattgaattttaaatttccattatgtttgtatgttctttgacaaggtgtcctactgaaaagtaaaatgtgaacatactgaccacatgaacgatcatcatcaagtagaagtactaatccacaggaaatgtcaaaaaagtacatctttcattaaaatatacaagaggaatattaacactaatttaatcatgaatcttctgaaactgtttcctggaatggcaataaggaaataattaatatgtagcttttttttcgagacaggctttggaggctggcctggaactagctcttgtagaactagctcttgctggtctcgaactcacagagattcacctgcctctgactcctgagtgctggcattaaaggcgtgcgccaccaacacccagctaatatgtagcttttacattattatatgcaaagtaaaaattgaactaccagtaataaatgctgatggattatattctgtgttgcaaaagtgaaaataaacaaaattgaatgaatttaaacacacataagtattaagcagaatatttattatgattatggtttcatgtgatagtggagtgtgtgtaaaccccactatattgactaaaacctagagaatcaagaaagtatacagtcaatacaatctgattttaatatcctaagaaagggaagagtgagctgggtaacataaactttgaagctcagaaagaagttcagatgtcaaagaatgagaaaagatatatgttctatataaaagagggcaaaaagcaaagagatgaaagagaaaagagaaggggaaaagcagaggatgggggaagacaatggggagaagacaagggaaaagaactgaagcacctacagagacattgagaggaataacaggttctttatctggcttctgttcttactattcaagagagcctacaataaatgagatgctgttaacacacattgatgagggcaaatctttataaattcactgcagctagtagaagataatttttagagaaaccctttcaggcacaaagaagcaaatctcccatatttacctgggttaatcggaatcaagtccaattaaaatattatatcacactccagagcagccatattaaattaaacaaaattaatcatgtacataagtgtctttcttcttaagttgtcccatatgcatgtcttttgttcacaaacttttctctacacttaagtactttaatttcaacttgctaggacaagatgaagaaaaatgaatatattcatcaatatcctgattgaaggtttatgtaggcaacccctgatgttttacacaaaataattcaggtgtttctggaaataaaattttctgtttgtttctttctgtataagaaattttttccggacatgctcaaaaggtagagtttataagaacccagtgacaaaaataatatcagatagaataagtcaaaatataatgagtctctgaagtgagagataaaagtcatgaagaatttgcctccaaaactatctttttgaatgcacccttcacttctttgttcctcaagctatagaccagagggttcaacatagggataatcatggtgtaaaacacagatgcgatcttatcagtgtccatggagtgactggagctgggttgcaagtacatgaatatacttgtcccatagaaaatagacactgcagtgaagtgtgaggcacatgtggatacagccttttgatatccagcacttgacttcatctttaggatagtgacaaaaatgagtatgtacgatatccagataactaacagagcaaaaaagatattgaagctcactacataaacaagaaccaaatcactgacatgtctatcagagcaagagagaaccataactgctggaagatcacaaaaaaagtgatgaacaatattgggcccacagaaagaaagactgaaagtgtccccagtgtggatggaggcattcaggaaaccacagaaataggaacctatagaaagacacacatacacacttctagtcatagtggtagcatagtacaggggcttacacactgctgtgtatcgatcataggccattgaggccaggagataactctcaacagtagcaaaggctacaaaaaagaacatctgagtagcacagtcattgtaggaaatgaccttgtctcctataagaaggccagtcatgactgtgggggtgacagctgaggaataacaaaaatcaaccaaggacagattgcctaggaaaaagtacataggtgtatgaagtcttgagtccagcacaataaggaggatcatccccaggtttcccactaaggtgatggtgtagatgagcaggaaggtgatgaaaaggggaatctgtagtcctggttcatcagtgagtcccagcaggagaaagtgtgtcacttctgtcctgttcttcatcaatgtcatctttcaatcataagatggtccataaccatgggaacagagaaacatgatgatgaagaaaatcattagtgagtatttttgccttttgatcaggaatctgtacattgaattctctggaaaatgaacctttacccaaatcaaatctaatgttttatctatagagagggttttatttaagagattttaaagattattaatggagctctacccaattttaattttgtattctgtatagtcataagtatatggggaccgtttaataataataaaaacaatgtgtggatcatctccaaatttacctcttacaatttatatctcactttctctattggtcacttttcaaggaatactctagacagccactttaggtgatgactcttaatcatctcaatgatattacaacttgtgttgatgtaagttatggaacacaagaaattcaataatttatgcataatgttaaattttgaaaggttagtctttgaatttatttaattatttctgattctcaaatttcagaattcagtcagactttaattaaattgaaaataacattaaacataattacatggctgccttggcaacaactcaacctttttttgagttacagagttctgtttctatttcaaaggacacatttctgttacactctgttgtcccaaaatacaggggccaaaaataaagtgcagaataaaactggtattttttgcttgccactaagttcattgttcattttctttatctgtattttagacactgttataagcatacatattcagaaagtccatgatttctcattctttctatgattccttcatcctctttctcaatggagctgattaaaatccgccattgctgaacagagaacatttctttgacaaaactcaaatgtatgtctttctctatacattttctccatttccctactacagcagctgctagcttttaagcttacctgcgtttctctcaagctctaataaaattaatctcaaacatcattctgagtttatttctaaagtattttactaatgagaatagagctgaataggggatggtgggaatatcggtaacagatgtagcatatctccatgtgcagaaggtatggtaggataacccaggtgacagtagccacttcagcttgatgcagttctaatagctagctgcaggcagataatcataagctacagcacacaaagatttttggtccattcactctatgggactcattctattcatgctaacttccctgacccctgaaagaaaacaaagtaatcaaacaaacttgggatacgattgtgagaagacaaaatgctagtaaaatgttgatgttgaccacatacatggattgttagttttcatgttatgtttggataggaagtgatcttctggtttgtgctgatttgctgtacatggactctgggaagcagggcttcacggcaaatgttattgacctgtccctcctcatgttgtctttcctcctgcagtagcaccactgagtatctatgctctctagagtgttccggctccctctgaaaacactgattgctgccgctacaattcccaggacccagtttccttgtaaagcattttttcatttagtaaatttctactttccttcaacttagtcttactttcatcctttcacagcatactaaagttaccaatgtcaaaataaaattggcaattttgtctctcaccaatcttttagaattgccttctactttatgaaatcatttgagatgacctggctgtcatataataacaatgtttcaacttctatatttgttttgtttccttagatactgagttttattttatcacttagtttgctccttaattcctaagatgaaactatcatccttcatgctttcaaaatggctgcaaattggaaggtgtttttttattttttgttgagttgaaactttgaaaggacatctacctcagagaaacactcattcctcaccagaaatctacttaaattctgaatatttcaggttatacacctattatttagaatactttcagaaaatactatagtatacaattaataagagatttgtactgaagtgtataagtaggtattattaatgttgattttggaggtattattgaagaaaatccaaatttaagaagttatcagtttttctaaagttatttctttaatttggaaacattcaagttatttttaagcctcatatcttcagaaaaaccttttttaatggaaaatacttttttaatgtaatgattatctgtatatgattggaagggaactgtttaaattttttagtgcatcatacagtaattttgaagtttcaaaaagatcagttttctcttgtgtttttatgcttttatctgcaataatagtaaaataaataaaaaatagaaaaaaatcacagatattcagtgtgtcttgtcttggttcttgcaaggttcatagacatgataagttaagagaagatctaaatttcctaaaatggtactatttgcattcataccttgaaccattagtttttataaagaaagagtttgcctcatccctttgtcttttaatgttattcacagtgttattgaacaactcactttccataaatttcaagtctcactgtaaatgtttatgcaatacattaggccatcagttctttgaaagaaaggagaactctgacattgagtatgagatcatcaagtcaaccacagaatgctggttacacagatctttctctgttagtgattgaatattttcatgctttctgggacattgaagaaaagaagaaagagaaatatgaatataaatctacttcttaaactctataaagtcatcctttttcaaagaagggccagtcacttgccttacttacagatcaaaaactagaagatttcatatctcactaaatttatcacttgtgaatgaagaaaaagatgacaggtctacatggcatcatacaattaaaagttctgtcaatacagcttttacctttgagtattgttccttatccattcatgaagtctgacaggacatattcagtcatgagttggccatgaaagagataactatgaataccattcagatgcatagatgaactcttctgaaacatgacatcaagcatgttgctatttaagaagctaatgcatgaagaacaagaaaaactgtgtagactgggacatccctagagatgtcttttatgggaataccagcaactcctaatatcctttctagaaaagaagcaattaaaactgtgtctactcatatgtctatgggaagtgcttctgattgaacttagagagttattaatgacagtgaaataaggaagtcattaagttgagagaaaagctgaatcactgggagaggtagaaggcatatgcatgtggtggaggcatatgatcaaaatacattgcatcaatacatgaaattatcatgtaatgaattaaacatcatggttaaacaggacaggatggttattctcactgttcacttgggctcatattacaggctatgtgtccttttaaggtgtttccattgacgcatactatctatattccagagaccacatacatttttgtaatgtgtcttgcatatgttctacacaatacctacaccaatatatctgaggttgtcttatacaagttgtaaaaacctaaaataaatctctagggccaaaatgatcatcttttgatcaatgtacaggtggagatgttttaagtagagatgtaatgaaactttagagtgggtccccttttctgcatgaatgttcaagttttcaattgttctcaatgagtgtgaaagaaactcaaatccatgtgttttgcatttataatatgcttcagtattatttgtcagttaaagaataaaatccaggaatttagagagattggcaagtgattaagaacacttattgttctggcaaagaatcaaactttgtttcccagcacaaatgtcagggggcagacaactgacctgtcactccagctcaagtggatctgatgccattggtctctacaggcacctgaagtcatatatgaccccccccccacacacaaacaaactcttaaaatattaaaaatgtccttgaaaaataaaatgggtttgaaatataaattacaatatgatttaaaaattctggttgaattaactatgaagatcaatttaaaattaagtactgtcatagtatatttagataaatgtttttcctatggagttcaaataatacataagtcacaattattactctgatagtggcaataaaatatatcaagatatcatttattatcaaagagcatacagttggaagacacacaagtgtaagatgtgttgggttaattactacttcaatttccttgttctacaattttcaaaagcattgactttccttaatctggcacattctggctcagttgcatgtatagaattttcatatttgatagccagaaaagcaaatttctcataggaaataaatcttctattagttctgtttgtgttcatatccctttgtatacagaatttgactatgagattggcattcctagagatgaactcaaccaagatttttttctggtgtaaatgggcttggctttctaagggtaccaagcactaatgaatctatatccatcaggaaaaagacaatggaaatccaaaatgctatttggcaatattaaaacataaaatatcggcagactgaccaggaactaggtgagtgagctcctgcccgctcccgaccccagaccagaacaccccaccacccccatcccaccacccccgcctgagcctgccggcttgggccagacacgcccagacagggaggagccccctgccccaccaatctgctagcaccccattcttacattccgccgccgcagactgacctggaactaggtgagtgagctcctgcccgctccggaccccaggccagaacaccctaccacccccgcctgtgcctgccggcttgggccagacacgcccaggcagggaggagacccctgccccaccaatatgctagcaccccattcttacattccgccgctgcagactgacctggaactaggtgagtgagctcctgcccgctcccgaccccagaccagaacaccccaccacccccatcccaccacccccgcctgtgcctgccggcttgggccagacaagcccaggcagggaggagctccctgtgccccaaatctggtagcaccccactcttccattccgccgaacgaccgagaaactaggaactagcgaggagaccaccaggagcgtcaagatcatctagagttgtggacatcgaattcctagcccccacacaccactgggccacaagaggagatagagagaacccacccgcacccactaaaaggatatggggagaagacagaataagatttcactcaacaacacaaagaccaacatgacaccaccagaacctagggactccactccggcaagagctgaaaagcccaacacagagcatgaagatgagatggacctcaaaaattatctcagcaagttgatagagacctttaaagaggaaacaagaaaatcccttaaagaaatagaagagaaagcaaacaaaaaattaaatgaattggaggaaaagacaaaccaaaaaattcaagaaataaataaatctcttaaagaatctaaagaaagccaagaaaaaacatccaagcaagtgaaggaagctcttgaaatagttcaaaacatgaaagctgaaatacacacaataaagaaaacacagaatgagaccatgttggaaatggaaaggttggataaacgatcaggaactaaagatgtaagtgtatccaacaggattcaagagatggaagagagaatctcagccactgaagactcgctagaggatatacattcatccaccaaagagaacctcaagtccaacaaaaccctaacacaaaatatccaggaaatatgggacaccgtaaaaaggccaaacctaagaataataggtgtagaagaaggtgaagaaatactgctcaaaggtacagaaaacatattcaacaaaatcatagaagaaaacttccccaacctacagaaggatatgcctatgaaagtacaagaagcttacaggacaccaaacagactggaccacaaaaagaagtcgccccgacacataataatcaaaacaccaaatctacagaataaagagaaaatattaagagcagcaaaggaaaaaggccaagtaacatataaaggcaaaccaatcagaatcacacccgacttctcaatggaaactctgaaagccagaaggtcttggatagataccctacaagcactaagggagcatggatgtcaacccagactactgtacccagcaaaactttcaatcactatagatggagaaaacaagatattccacgacaaaaacagatttaaacaatacatatcaacaaatccagcactacagaaggctctggaaggaaaactccaacccaacgaacataactacactcacaaaaacactggcagtagttaatcgaatttcaccaaacacaaaaagaaacagaagggcaaaatccacacgcaatgataccaccaacaataaatccaaaactaagaagaaccaatgaacaatggacgttaatatccctgaatgtcaatggtcttaacttacccataaaaagatataggctaacagaatggatacgaagacagaatccatccttctgctgtttacaagaaacacacctcaaattcaaagacaggcgatacctcagagtaaaaggatgggaaaagattttccaatcaaatgggctcaagaaacaagctggggtagcaatactaatatctaacaaattagactttaaactgaaagcaatcaaaagagataaagaagggcatttcatactcatcacaggaaaagtccatcaagatgaagtctcaatcctgaacatctatgctcctaatacaaaagcatccacttttgtaaaagaaacattactaaagctcaaaccacacataaaaccacacacacttatagtaggagacttcaacaccccccttataccactggacagaactactagacagaaacttaacaaagaaacaaaggatctgaaagaagttatgacacaactgggtttaacagatatctatagaacattccatccaaacacaaaagaatataccttcttctcagcgccacatggaaccttctcaaaaattgaccacatagttggcagcaaagcaaacctccacaggtacaaaagtattgaaataaccccctgtatcttatcagaccaccatgcattaaagctagaattcaacagcaatacgaattgcagaaaacctacatttacgtggaaaatgaataactcccaattgcaccattcctgggttgaggaagaaataaaaaaagaaatcaaagactttctagaatttaatgagaatgtagacacaacatacccgaacttatgggacaccctgaaagcagtgctaagagggaagttcatagcactaagtgctcacatgaagaaactggaggaaagtcacattagagaattgacagaacaactgaaagctttagagcaagaggaagcaaacacaccaaggaggagtagacgccaggaaataatcaacctgagagccgaaatcaacaaagtagaaactaggaaaacagtacaaagaatcaatgaaacaaagagttggttctttgagaagatcaacaagatagacaagcctctagccaaactaaccaaaaggcagagagagagcatgctaattaacaaaatcagaaatgaaaagggagacataacaacggacactgaggaaatccagagaatctttaggtcatactttgaaaacctgtattccacaaaattggaaaacctaaaggaaatggacaactttctggataaatatcacttaccaaaattaaatcaagatcagataaacagtttaaatcgaactataacccctaatgagatagaagcagtaatcaaaagcctcccaaccaaaaaaagcccagggccagatggcttcactgcagaattctaccagaaattcaaacaagagctaattccagtactcctcaaactgttccacacaatagaagcagatgggatattgccaaactctttctatgaggctacaatcactttgatacccaagcctcacaaagatatgactaagaaagagaactacagaccgatatccctcatgaacatcgatgctaaaatactcaataaaatattggccaaccgaatacaagaacatatcagaaaaatcatccaccatgatcaagtaggctttatcccagggatgcaaggatggttcaacatacgaaaatccatcaatgtaatccactatataaacaaactgaaaaagaaaaaccacatgatcatctcactagatgctgaaaaagcctttgacaaaatccaacatcccttcatgataaagatcttggagagaacaggaataacaggaacatatctaaacatgatcaaggcaatatataccaaaccaatagccaacatcaaagtaaatggagagaaactcaaagcgtttcctctaaaatcaggaacaagacaaggctgtccactctctccatatctcttcaatattgtacttgaagttctggctatagcaataagacaagaaaaggggatcaaagggatacaaattggaaaggatgaagtaaaactttcactatttgcagacgacatgatagtctacattagtgacccgaaaaactctaccagggaactcctatggctgataaacaccttcagcaagttagcaggatacaaaattaactcaaaaaaatcagtagccctactatatacagatgataaatccaatgagaaagaaatcagggaaacatcacctttcacaatatccacaagcaacataaaatatcttggggtaacactaaccaaaaaagtaaaagatctgtacaataagaactttgagactttaaaaaaagaaattaaagaagataccagaaaatggaaagatctcccatgctcatggataggtagaattaacatagtaaaaatggcaatcctgccaaaagcaatctacagattcaatgcaatccccatcaaaatcccaacacagtttttcacagacattgaaagaacaatactcaactttatatggaaaaataaaaagcccaggatagccaaaacaactctttacaataaaggatcttctggaggcatcaccatccccgacttcaagctctactatagagccatagttctgaaaacagcttggtattggcacaaaaatagactgatagaccaatggaatcgaattgaaaaccctgatatcgacccacgcacctatggataccttatttttgacaaaggtgctaaatctatacaatggaaaaaagacagcatcttcaacaaatggtgctggtacaattggattcggacatgcagaaaattacagatagatccatacctgtcaccatgcacaaaacttaagtgcaaatggatcaaagatctcagcataaatccagtcacactgaatcttctagaagagaaagtgggaactacccttgaacaaattggcacaggagaccacttcctgaacattacgccagaagcacagacattgaggtctgcaattaataaatgggacctcctgaaactgagaagcttctgcaaggcaaaggaaacagtcagtaggataaaacgaccacccacagaatgggaaaagatcttcaccaatcccacatctgacagaggactgatttccaaaatatataaggagctcaagaagctagccaccaaaacaccaaacaacgaaattaaaaagtggggtgcagaactaaatagggaattctcaacagaggaatctgaaatggctgaaagacacttaaaaaagtgctcaaaatcattggccatcagagaaatgcaactcaaaacaactctgagataccatctcacgcctgtcagaatggctaaaataaaaaataccaatgacaatctatgctggagaggatgtggagaaaaaggaacactcctccattgctggtgggagtgcgacttgtaagaccactctggaaatcagtatggcggttgctcagaaaaatgagaatcagtgtacctcaagatccagccattcctctcttgggtatatacccaaatagggcatgtacttacaacaaggacatatgttcaaccatgttcatagcagcattgtttgtaatagccagaacctggaaacaacccagatgcccctctattgaagaatggattgagaaaatgtggtacatttatacaatggagtactactcagcagaaaaaagcaatggaatcttgaaattcgcaggcaaatggatggaactagaggaaaccatcctgagtgaggtaacccagtcacaaaaagacaagcaaggtatgtactcactgatatatgaattttagacatagaacaaaagactaccagtatataatgctcttcaccaaagaaactaggaaacatgaaggactctaagggttaaatggtccccaggaatggaagtggcatgaactcccgaactaattgggggcatgagggtgggggggggaaggagctgctacaataagagcaagagaagaggagaagaggagaggaaatggaggggcagaaacattgagttgggggaagaatagaggaaagagagcaagatgagagatacgatatcagagggagccactgtaggcccgagaagggatcaggaaccagggagatctccagagacctacaaggatgacacgatctgacaatccaggcaatggtggagaggataacctaaaaaccctccccctaaaatgagattgatgacttctctttatgccatcctagagccctcacccagtggctgatggaaacagagacagacatccacagatatacaatgagccgaaatcgggaatttagttgaagagagggaggaatgaagaacgaaggggtctgtactaggatggagaaacccacaggaactgttggcctgaacaagggagagcacatcgaccccagatgctgtccaggaggcctgtacaagactgatccagaccccagaacatggatgtcaataaggaggcctctgcactccagggagcctctggtagtggattagtatttttccctggtgcaagaagggactttgagagcccatcccatatgaagggttacactctggccctggacacatggggaagggcccaggatcagcataggaagacttggtggactttgctgagctcccgttgagggccctaccctgcctggggagtagtgggtggatggggttgggggggtgggctgggggtgggggagaaagtttgggggtgaggggagggagagggagaagggacttgaaataagcttgttccctaactagaactaataaaataaaatttaaaaaaaaacataaaatatcatcattgcacactgaaaatgaagcatgtgaataaaatggagtatatcaagaaatgtgtgacagaccaattcccgtggagggttactctgtcagccaaaatcagggaggagggcataggacctcccccaaatgatgtaacagaccttgatcatccgcatggaaggccttaccctccctagggagtggatagagcatgggatagggaggtcagtaggggttaggggaggatggaagggaggggaactgtgattgatatgtaaaatatgattgttttcaaatttaataagtaataaatttgtgaagctttgaaattatatatcaccttaaaaattcatgtgctgagcctaagactcaaggtggcttcattaataaatgagacctttaggggagatgcttggtacatgaagcaaccctcagtgtggcagtgtgtgctcaactcataggagacaatgaactatttccttatcattaaggatcagtgagcaagtacatggctattagggagttagcatagaccattttgtgtgtttccttcttccacttaattaggattcagaattcacacctgtgagaatggtaaggattcaggcattgagctagcctgctcctgtcatctggcagaatgcattcaggcaataccctgatcagcctaggattccatctttgatagtctgcatacaggtggaaaggacccctttaaaagacagacacaggactttcacacttgtctctttccccctgttcccctggagcagaagggacttttcctgtctcactcttctctgtctactttgtctctgtgtctctatggctcttttcctatttttcttctgtcccttccctttctagtaaaacttctcactaagctgtctgtctggcatgtttttccccatcctaggtcaccctcacctaacagggaattctctaagcttctcctagtgctttatagtaacaagaattcctcagcttatatgtatttgttttctatcatgaagaaatagagcaaaaagaaggcaaagaaggaatgagccctcaggtaacttaggatcaaattgttggcaattttaatttagatgaccaactttctaaaatctgataaataaatgtctgttttctctacattttattggtgctttgtcataagacagataagataaatcatcacatcatgaatgatacttttgaaatttttgtcaaacaatatgtgcctttttactcctgatatcatgtgtggaagagaaaacaagataaggaatatgactgtcattttaaatcctggatatgtggctggcaataatgaaaccagtccaatcttgtgagtgactgatgtggaaactaataggttagtagatttaaataacacttccacttgagcagctatgctacttaggaaacttggcatccatacttaaggggcatgcatccaaacactcttaacccagtgtaaaaaaagcatactgatctctccaagctagagagatttctttaagagttccttttgtcattggttgctgtaccacctcccattgaaatctgcctgtggcttttaaatgccaatgaaatcccatgggtactaaggatgtacaaccctgaatattcaagcatgccagtctcccaaactgagtaccacttattatgtaaaaaaataaaattatggtgactgtgcttcatttaatattaatattaataataatattaatatacatgtatatttaatatacatgatttttgttaactaaatagattcatttagtgttttacccaagttaccctcccaccgccatccagagctgccatgttcaatttaactgaaaaattactcatgtccatgagttttttcttcttacattgcccatatgcttgtctgttgttcataagcttctttctacacttatgagctttcatcttaacttgctagggtaacatgaagaaaagtgaataaattcatcaatatcttgattgaaggtttgtgtaggcaacccctgatgttttatacaccataatttaggtacatgtttctgaaaataatctttcggtttgtttgtttctgcaaaaaaaaaaaaaatgtttcatagacttgcacaaaaagtgggttctggtatgattcatctttctgcccaaagcccccgagccccactgccacatgtgcactctatgccagctgcttgccagagttagggcccaaattaatacacagagagacttgtattaggttcaaagctgcttgaccaatgactaggattctcatctggtagctcagtcttaattatcataaatctatatattttataagacttatcttaccggatgccttattggcatccctccttgccggtggataacattgctccactggaggaagagcggaggggaaaaggggacccttcctgtttctccttgctaaatatgagtctccttgctatgtcacttccggcccggatcatcacttctctactacatttcccaaaatcttcattaactcctagtcctgtctaacttgctgtttcattggccaaacagtattttatttaacaatcaataagataaacatacacagaagtacttcccccatcagtgggttttaaatgtaactcagtaacaagaaatatcagaaaagtctgaatccaagtatcatgagtctctgaagtgagaaatcaatgtcaagaggattttgcttcccaaatgatctttctgaatgcaccctttacatctttattcctcaggctgtagaccagagggttcagcatgggaatgatcatggtgtagaacacagaggcaattttgtcactgtccatagagtgactggaactaggctgcgcatacataaaaatagcagttccatagaaaatggagactgcagtgaagtgggaggcacaggtggacacagctttgtgatgtcctgcagttgactgcatcttcaggatggtgacaaaaatgaatgtgtaggatatccaaataactatgaaggcaaaaaatatgtggaagctcactatatagacaagaatcagctcactggcatgtctgtcagaacaagagagaaccatgactgctgggatatcacagaaaaagtgatgaaccacattagattcacagaaagagagccagaatgtgtctccagtgtggatggaagcattcaggaaaccaatgacataagagccaatgatcagccatgtacacacacgtgtagtcatggtggtggcatagtgtaggggtttacatactgctgcatagcgatcataggccattgatgccaagaggtaattttccacagtaccaaaggctacaaaaaagaacatctgagcagcacagtcattgtaggaaatgaccttgtcttctataagaaaaccagccataacttttggagtgactgctgaagagtagcaaaagtccaccagagacaagttacctagaaaaaaatacatgggagtgtgaagatgagagtccaggacaatcagcagaatcatccccaggttccctatgagggtgacagtgtagatgatgagaaaggtgaggaagagtgaaagctgtaggctagggtcacttgtgagtcccagtaggagaaagtgtgtcacttccgtcttgttcttcatcatgttctacaatatctgcagtaataaaagtacaatataataaaggaaatgttaatggaaagttacgaacaaagtgtgtactttttctattgtggctatatatattcccttaatattttccaaaagaatgtacaaacttgaaaaacaaactaaatgtatcaaatgtatagagggttgcacaatatcaaatctcggccatctgtacaattttaacattttatcaatttgtaagcagacaaaatgacaatttactaatttgatgaaaatgattagtgtagatgaacctatttaaaagcttatttttctaattacaataaaagctgacacttccattggagtacctgtcaaaaatttctgtagtcacattgatttttgcctgcacaataccctctcaaccatgtttcttgttacattttataaattattaagcacttgaagtgagaaatttatccacactgttatgatccttagttgcaatctcatctctataaccatatgaatttttgattcagaataaattattcctaagtaggtctgagtagattcaagttaaattaaatttaaacctttgattcaattttactgaactattaactagttccatgtgttattcacagcactttaaactcacagtggaggtaaaaccaagcagatagaatcctgaagtatgacttgcgtcctcttttaatgacaacaatgccagcaattaattaattattttttaagattttctttatttcttatgtatatagtcttctgcctgcatgtcagcagagggcaccatgtctcattacagatggttgtgagccaccatgcagttgctgggaattgaactcaggtcctatggaagaacagtcagtgctcttaagcgctaagccatctctccggccctaattaattattttttataatttatttattcttttaaatttcattttaaaatccaatcacagtttttcctcacactttttctcccactcccttccttgcctccccctacagcccacccctagtctactcctcctcccaggtaagggctctcatgaggagtcaacaaaggctgacacaatagattgggcaggcccatgcccttctcccatgcattaagcctgaacatggcatctcaccatagggaatttatgattcctatttgacatgtaaccttttcctgcactagctcatgattattatctcctgctcattgatgcatacatatgtttataaactgaagttaaagatgagttcacctattgaatcatatactatcctagggcattcttaaaatggggaattattagggcaggttcaactaacagaggcaactctaagttttgtatatctctagttacgtgcagcagagaattcaggttcttcaaacagatgttgccacttgtctcctaacatcatatttccatcagaaaaattcagattattaataatatctactttatgttaacattgttgtgatactacataaataaataaaaataaaataagttagtatataaaagaaagccattttcagtgtttatcacaggtgacaaagtctatcatgttgttattaggatgggccaatggaaagcatgttttgatcaaggccaatactggaaatgcaaaacttcatttgtcatgagtgaagagttgacatttccctgcccaattttctgtatcttagaccctggtatcagttagtgtctacaccttccagtatttagttctctttactccgaatgtacagttcctacttctgtaataccatctgagaaatttattttgaaaaatttccttcgtgaaattttgattttcatctgggcaaaagaaaccaacactgttaatatctaaattttctttctgattttaatattaaagacttcctttaaagaattaaatcaaaatgaagacacaacatactgatcggtacatgctgaaaaagcctttgagaaaatccaacatcccttcatgacaaaggtcttggagagatcaggaataacagtaacatacctaaacatgataaaagcaatatacagcaaaccaacagccaacatcaaactaaacagagagaaactcaaggctattcctctaaaatcaagaacaagacaaggctgtcaactctccccatatctcttcaatattgtacctgaagttctagctagagcaataagacaacaaaaggagatcaaggggatacaaattggaaaggaagaagtcaagatttcactatttgcagatgatatgatagtttacataagtgacccgaaaactccaccatggaactcctacagctgataaaccccctcccaagttgcaggataaaagattaactcaaaaacatcagtagggctactatatacagaagataaatgcgctgaaaaagaagtcagagaaacatcaccctttaaaatagcaactaacaacataaaatatcttggggtaacactaaccaaaaatgtgaaaggcctgtattataagaactttgagtctttaaagaaataaattaaagaatatagaagaaatggaaagatctcccatgctcttgtctagataggatcaacatagtaaaaatggcaatcttgccaaaagcaatctaatgattcaatgcaatccccatcaaaatcccaacacaattcttcacagacctagaaagaatagtactcaacttcatatggaaaatcaaaaagcccaggatagccaaaacaaccctgtacaataaagaaacttgtggaggcatcaccatccctgacttcaagctctattacagagccatagtcctgaacacagcttggtaatggcacaaaaatagacaggttgaccaatggaatcgaattgaaaaccctgatattaacccacacacctacgaacacctgatttttgacaaagaagctaaagttatacaatggaaaaaagaaagaatctttaacaaatggtaatggcataactagattcagacatgttgaatattgtagatacatccatatttatcaccttgcacaaaacttaagtccaaatggatcaaagacctcaaaataaattcagccacactgaacctcccagaagagaaggtaggtggtactcttgcacaaatcggtacaggagaccactttctgaacacaacaccagtagcacaaacattgagatcaacagttaataaatggaaccgcctgaaactgagaagattctgtaaggcaaaggacacagtcagcaagacaaaatgcaagcccacagaatgggaaatagtattcaccaaccccacatctgacagaggactgataaccaaaatatacaatgaacacaagaacctagccacccaaacaccaaacaatgcaatttaaaagtggaatgcagaactaaatgagaattctcaacagaggaatctaagatggctgaaagacacttgagacagttctcaaaatccttagctgtcagggaaatgcagctcaaaattacactgagataccattttactcttgtcagaatagctaaaatcaataacaccaatgatagtctatgctggagaggctggagaggaggttgagaaagaggaacactcctccattgctggtgggagtgaaaacttgtacaaccactttggaaatcagtacagcgtttctcaggaaaaggggaatcagtctaccacaagatccagcaatacctctcttgggcatatacccaaagaaggcacattcatacaataaggacatatgttcaactgtgttcatagcagcattatttgtaatagccagaacctggaagcaacctagatgcccctcaactgaagaatggatagagaaaatgtggtacatttgcacaatggagtactactcagcagaaaaaaaaaaacaatggaatcttgaaatttgcaggcaaatggatagaactagaagaaaccattctgagcgaggtaacccaatcacaaaaagataaacatggtatgtacttactcccatatgattgttagacatggggcaaaggattaccagtctataatccacactgccagaggagttaggaaacaaggaggataccaagagaagattgcatagtccctcaaagaaggggaggagaataaaatctcctgagcaatgtgggagccggggcggggaaaggaaggaagtgggaaagaaagaaagggaggggggaggaggacaagaggactgaggcaggggaggaatagaggagcgcaagtaaggagatgccttgatagagggagacaatacaagtttggagggaggtctagcacaggggaaatgttaggacacaggcattggtagagaagataccattgatgtccttcccctataataagatagatgtctaccttggttactattcctagagccttcatccagtaggtgttcgaagcagaaacaggtgcccacagctaggcactgaaccacactcctggaatccagttgtggagagggaggagtggtgagcaaaggagccaagccagtgttgcagaaacagacagaaacagtgacctactgagaacatgaagaccctagtcataaagctgtgtaaacaacattggactgaaccaagccctctaaatgtgggtgccagctaggaggccaagacagtctatggaacctctaacagtggagccactgtttatccttagagcacaaatggactatggtagcccattccctatgggaggatagtattgcagcccagatacagcaatgagggcctaggccctcccccaaatgatatgactgactttgaaggtcccctgtggagggcctcactatccctgggtaggagttgggggatgggttggggggattgctgggaaacatgagaggatgggagtgtgaggaatggggggatggataagtaaacatgagtagtaattaaagaataaaaaaggaaaaaattattaggttgtgactcccacaaatcggattttgtgggagtgagctatgtaacatatttattcttttatcagtaagggaagtgagtattagaagaactatgtgcagttggaaatttatagaagcagtataaaaatactcaagatgattaattaatctgggtttggacttcatgtgtgtgtattttttctttgtgtgtgtgtgtgtgtgtgtgtgtgtatgtgtgtgtgtgtgtgtgtttgtgtgtgtgcttcaatccttcagtaaagtgcaaagatactgtacagaagatagtcattacaccatcaatcaaaatatcatttcccttactcctattcaattttataggacacatgaattgcaaaattagacattttgacatatatgctccatatcacctcagtttactaagtcttttgaaagtatcattatcccaaagaacctattatagaggaagattccatactacagttgcataaattatacttctcacttgaatacttgtgaaacatgtattcaaaatgacatgccactttgctagaagagaaagaatatttaattcagaatgtgattttaagtcatgaattcagctatattgtatttagtaaatgctgtcagaagatctctctcaggaaggggtcaaaatattctaacttttgtaatgcagatgagaatggtgaaaagaatagcagcacacatatcaaatactgtatgtatctcgtattctttctgtatccttgaaagagtcactcaactcccttatattggtaaaagacacattacttttctctcacaagtcataattatgtccacaaataacacaggtcaagaaaatgttattatgtactcacaatgattgccattcaaacaaataaaggatgtccaattgagcatggtatacataacacttcttataaaacacatgatactgagtcactttgggaaactggaataattgcagtgagttagaaatctctagatatttccctctagagaatatataacccaagcatccaaccacccacaaacagaagaggtatttaacctgcctctggggatcaagatgactattatctcttaaaaagtaaattttattatttcattaattagtaagaacattaggatatatcaaagtgcattataccatgaattatttatacatgcacgcgtgtgtgtgtgcacatatatacatatatgtatgtatgtatatattgtgatgtgacatttagatgagactaaatatatctctctcccaaagttcattagatctttatgatgaaaattcaaatgttttttcttctctggagttcactcattgttcttgaatgttatctaaagtcatcctgttgtgtaatagcacactaaaacctctgataacagttaataacaactatacagcctttgttgatgtcccttcacccctttgtctgtaatctcttgtcaccattattcaattgtcatcttttgtgagatacagttttaaaggtgccatatatgaatgaggtcagtaagcaactgtttgtcactctggcccatttcactaacatagtgacctttagttccatccatgttgcagcaaatggcagtttacttgttaagcatgaacagagttcaatgatgctcacacttcacattttctttatgtttcggcagctgacagatgacctgtatgttttcttgccctggtcattttgcatgaagctacagtgaactttgaaagaactaagaaattaatgatttaactttctttgaattatgtttagtagtttagtggctggatcatcaaatgtttttatcaagtaataaattgttccaagaagtacagctttgttgcttggttaaacattgttctgaatatcaagcttccttctcttcacatttgcataatgaacttattcttctcatcgaccttcccagtagtgaagctgaagatattgtgttgtcattctctcaagttttttagaagtacataaaatggcatttatgtcaaagaaagcattacactaccatatgtcagcatccatgggatcattaatgcctttatatgtaaaatttgataaaatatggaccataaaaccactggtatgatggctgggtgttggtggctcacacatttaatcccagcacttgggaggcagaggcaggcagatttctgagagttagaggccagcctggtctccagagcgagtgccaggataggttccaaagctacacaggtaaatcctgtctcgaaaaaccaaaataataaaaaaaaacactggtatgtacttactatatctgcctaccaacatgtttcagctcatccaagaattttgtataatcaatgtatgtaatgggccgctgggacaatttcattgtttttgttattagattgttctatttgttagaacacactccatgtttctgttgtctttctacttcctcagaaatatccaaatttaataacctagaaaatgcaaaaaagattatgcttccacagctattgtcttattgtgacaagatagagaaaaatccttttataatttagaaacatccttattttaaatatcaatcccagttccctccacttcccatcttcccatatccctcaccgacccctcattcctctgctcattcctctgcccagtcactcctcaggaagggtgaggccttccatgtgggatcaaaatcttaaccaaattacttctacaactatgtgatggacatgcagaagcataagtaggaaagaaatgaaatgaatgataaattgaaaaaaaggtaatgtgacatgctattgaaaatattgccttcaactgcctgagaataagagtccaaggcattttatgtcctcccagagagatacttattcaggctacattcattgaggctctatccacaacaaactagtaaatggaagtagcctagatagatgttcaccagctgatgagtaggtaatgaaaatgtagtacacatacacaatggaattctactcagtggcaaaagaaaaatgagttcatgaaatttgtaggcaaatgtattgaactggaaagtatactgagtgaggttactcaggcccagagagaaaagcaatgtatgttttctcttattagttgaccctacctctgcatctttagatttgtgcacatgatctagagtaaatttagaagccaagaaagtagaaaagagcatgttgagagaggttctagagaagtggatagcaaaatactgtgatatgaatgggtaaaagaaatcacagtagggacttaaaaggagagagagatgagggtaatagagaggaagatgtggggaagagagataaatagcactaaggatgtttgaaaaagccgtagagtgatattattttgtgagctaacatacacatttgtgtgtttgtgcatgtatgtctgtgtgtgtgcacatgagcctgtgtatgtgtgtagttcaaatagagttgtcccaaatgaggtgaaaatgctccatccatgatggagtatctaacaaaaatcccagtgctgggtatgggaaacttccctttcagttatgggttgcaaattctaagagattaccaaaaaaccacaggctattgttgtctgctagaatatgaaaataagaccttattgataaagacaatatttatttcagacccagaagtttgagcatcaagctggtagtgacctggaagcctcttccctcatgacaagctttcattgtattgaaaggtactccatgagctgccaaaggagaacaacctgaaagatattttcaatgttgtaattctggcattaataccttgagagcaattaataatgtctaagtgtacttgaggcatactcaatagaggggaacttatgactgacactgtaaatttagtcaagaacttgtggcttgggagatcatagaccaataggagtttttgccacttctattgtctaaatgaagattccaactctattctacatagttattcttacacccaaaataaccatatctctcatccttcattaaagaagtttatttttgtagcacataaaggctactacagagaatgacaacatatagcaagttaaaacaaagaacatataaccatgggatgcccagacctaactgttccaaggaatgaatggatctgggctgtaatacatgaagatgacagtcccacagacaatagtggctgcattcaaattagaggcccaagtggatacagccgtgcaatgtcctgagcttcatacataggatggtatgtaaaatactcaaataaccatggtagcaaacaaagatattgaagcttactacataaagaataagcagctcattgatattcctatcagagcaagagaggagaaccatgactgctggaatatcaccaaatatgatggaccacattgaactcacagaaggagatattgagtgtatctccggtgtaaatggagatatttatgaaacctagaacatagcagcctataagcagccatacatacacatctgtagtcatggttgtggaatagtgtacaggcttatacaccgctgcctagtgataatatgtcatttatgctaacaggtagttttacacactggcaaaggcaatgatacagaacatttgtgcagcaactcatcgtgggacatgaccttctttcttttaagaagtccagcaatattagaataacagctgaagaattacaaaaatctatgagagacaggttacctagggaaaagtacatgggagtgtgaagccaagagtccaggacaatcatcaggatcatccccaggtcaccctcaccagagttgagatgaggaggaaggtgatgaagagcagaaactgcaggcctgggtcactggtgactcccagcaggaggaatatgacactcctgtcctattccttatccaagatatgtgagatcaatggatgttcttgtggccataagaacaaaaggaacaaaattataaaagaaaatgatatgatatgcatagaaaccactgatatatgacttgtgccttaagcttcttcaaagaaaatccaggcttcacaatcaagttgggtaaactaattatatagcattaattattctatgaagtgcagaaaactaatagataatgtagaatattttaaaactttctttataaacactgattttgacaatttagtaatttaatagaaatgtcttgtttggctgagtcttttgccaagtaatctctcctgaactcagaaccggtgacacttccttattgctcccctcataaacactgttgtggacactttttgaaatgtttatattgggttttcttaggaatgtattaattggattaccacatttatgtaaattacaaagtacaagaggttgaataacttattcctgttactaaactattaattggcattatctgctttgaactcatgccaacttttaaatgatttgaagtgactgttaattctcagtttgtaatgaatttaaatcaaatctagccacttaagtttgtaattactttttgtcacctttcatgaaactcaatatttacattttcacagtgaagtaatagggtaactgatcaagtaataatttcatatattttgccatgtacttttaaccattgcagatacaaaaaaataaaaaataaaaagcttccagttgaaaatggggatctcttttttatttagattagaaacaatcttattttacatatcaatacaagttccctctccctcccatcctcccatgccccgactgaacccccatcccatcccctttctgctacccagggtgggtgaggtattccatgggggtcatcaatgtctgtcacatcatttggggcaggacctagacctttccccatgtgtctagtcagagagtatccatctatggggaatgggctcccaaagtccattcatactctagggataaatattgacctactaccagcggcctcaaaaactgtccaggcctcctaactgacacccatgttcagggggcctggttcagtcctatacctgtttcagagctgtcagtctggggaacatgagctatcccttgttcatatcagctgtttctgtgggtttacccagcctgatcttgacccctttgctcatcactcctccctctgcagctgaattccaggagttgggctcagtgcttagctatggatgtctcctacttctgtcagccactggatgaaggctttaggatgacatataaggtaggtagccatcaatctcattatatgagaaaggtatttaagatagcctccccactattgcttagattcttagatgggatcatattgtgaaacacaatatatgtggactgctaaggagtcagagcaagtttgatgagcagatgtttcattggggaagtactcactcaatagagtcagtctcataccaccaggtaagccagcgaatagagagagccgcctgtgtgtgacccttatatttaaggacttgctacatcactttgaccaagtgtgcatggtctgtgtcacctatgccagccccctagaggctgacatttccccttttagtctaaaagaggattaaaacttaacagtgtaaattatctatcattaacaatgataagggtgaaatatatgaagttatatctactaatgtcacatcttaactataactattccaactaaaccttgaagtcatccaaaagaaacgcccaagcttgaacacctctttccaaacccaaccttaaacaataggaaactagccctaactaggtgtcaatagtggggaaagggagcatagtgttctccatgctacttcctgctgaactgggacaatgacagcctcgaggggtgctgtgagaagaaatgttagtgtagtgaaagtcctgaatgggttatatccagatcatgtctggtgggagatacttgattgaaggtccagattgaagtccttatcttgattaaaattcttgtgttgactgaagtcagtatccgaagttctggatgaagtgtcagttgaaacaaagcaaattggatccagtgtacccaaggaggtgtggccaatttctttccagagtgtccaggggttgctgttaggcaggtcttcagaaatgtttgcttgtatatgtatgcataccaagaaagacaaccatgggaaaatagtaattatgtgaggtgtacaccttgagagaagaaagccaagaaaaaacaaatgacagtccctaatctttccccaattctgtattatgtcaattggcttcttgatattgaatagaaactctgaagtttattttaacaacatgctaggatttagaggaggacagccaaatccaactctaaggccagcattggtataattgaatagggactaggaaataaagacagaaacagttctctacgtgacagctttaaagttaaccatatggcacattccttttgtttgatggttatagctaccttctcttcttaagtatctacccattcagtgtcctttgacttctggagatgaggtgtcctgtgaagataaatgcaaaacacttccctttcctttgggaggtttctatacagttttgagatataccatggtatgttacctgtcattctttcttatcgagaggtttttcttttagaactcaaatcttgattaactttgatagtatccaaaattttattctcctgtggaaacaaatgcaaaacctcttccccaatggaacacatgtcctggtttccatacagaggtcagtacatctttgaagtataccagctgattcagttcagcagttttttttctgtagtccagtgtctttctgcactgtttgtcctttttcattagcattaagaaagtttagtgttaataaagcatcatgtaacctatgttttggggtttgttcccccagcctgtttatggagcatttcttttagtgttctattggatctttctaccactgcctgtcctacaggattgtgtgatatatcaattacatgctttatgttatgatattagaaaaaatgtcccaatttagtggagacatatgctggagcattgtcagctttttatttgtgcaggtatacccataatggccatcacctctaacagatgtgtaataacagaataggctttttcagagctaagagcaatagcccattgaaaccctgaaaatgtatctatagtatgatgcacatattttaaatttccaaattcgcaaagtgaaagacatccatcagccaaacctcatttctctaaattcccttaagattatagcctgctggcaatggagcttgattatagaaggaacaggtaggagagtttctcactatttccttgggtgttgccaagtggtggagaagtcctttttcaaacctctactatttacatgatgtttcttgtgaaattctgaggcttctagcatgcttcctattaataaatgatcaatctcatcattgccttatcctagtggacctagaagacccataagggatctgatatgtgatatatatatatatatatatatatatatataatatatattatcatatatatcaatatatatcataaatatatcatatcacatatatattaatcatatatataatcatatatatatatatatgattaattctgtttctgagtatttcctgtaattgtataagtagttaagttaattctgtattataaggaacaaatcctgcagtctcaatttgtaagacaactttctctgcttattgagaatcagtaactatattaagaggctctgtaaaatccataagtaccatgagaatggcatataattctgccttctatagagatgtatatggactttaaactactttacttacccctcctgatttataacctgccttacctgatttgttggcatcagtgtagaaggtaagaacaccagaaatgggagtttgtcttacaatacaaggaaggatccagattgtcttttatatgaatttaatcctgtcagttttgggataattgttgctaatcattccccaaaagtcagtaagagctatctgccagtattcattgtccttccataagaaggaaatttcttcattagttaaagttactattatttctgctggattttttccagtcagttgatgaaatttgccctttagaatcaaatcagaaatcttttctatgtatgtctttaactttttcttctgtttctgtggcagaaatatgcattcctttataatatcttctctctgcatcagaatcccagaagggtattttctggagggtaatatgaccagaattcagtctagattagtatatacatgatctacatgtgcatccagtattctgctttccacccattgtaattctttttctgcttcgttggataatattcgtggacattttaagttcttgtcctctttaaagaccatttttaaatgttttaagtcatgtccttccacaccaataattgtctgtagttgaaaaatttccctaatagtttctgaagagaattaagagtttgataacgatctcttctaatttgtaccttttgcagcctgattttttgtaagtctatcttgtaacctaaataattaacagaatctcctctttgtatcttttctggggtaatctgtaacccaaaacgaggcataacatatgtcattatacatatgtcccaatgtttccttattagaatctgataaaagaatgtcatccatgtaatggtaaaaaagggattgtggaaatttcttacgaattgtttccaaaggttgttgtacaaagtgctggcacaaagtaggacgatatagcattccttgtggcaaaaccttccactggaatctcttaactggctgtgaattaagagtttgtatagtaaacccaaatttttctctatcattttcctgtaatggtatagtgaagaaacaatctttcagatcaatgactatgatcagccatcctttagagatcaaggaaggcaatggcattccaggctgcagagagcccattggctgaagtaccttatagatagctctcatatctgtccgcattctccacttacctgacttctttttgataacaaatataggagtattccaagggctggtagatacttctatatgcccagcctcaagctgttcctgtactaacttttgtaagcctctagcttctcagagttcataggacattgtcctaccccgacaagttcatctgtaagcaactttaagggtagttttatcatttgtacttagtttttgtacagcctgaatggttggtaactgtcttccatagcggcttaccaaattttttctgccacctaaagattgtatataatttgtatccactactagaggaatattattgctacatctgcaatataaggttttagtatgctttctgtccttctggtccaatgcagaccatccagttaacactctgtcgaattctagatagagttccaatccctaaaaattgtacattcacctctctaagaggtcatctctgaggccaggacttttgggtaataatagttacatctgccccagtgtccaccaaaccagtaataactttattattaattcttattttcaactgaggcctcttatcattaatataagtttgccaaaatatgcatatatcatcttctctagtcacgtttgattcctcattactagccaaacttccatctagagtagtatcacttttgtcaataggcaatgtaccatctattcttcttgtgaaagattgtcctccatagtgactgggaatgaccagacctttctcgatgtgggggccttcgagagtccccctcaaagcattcctgattgtaacaggtttccttgaaagtctctggtcagtctacattcgttggtccagtgtctgcccttaccacatcttcttcacaatccagaaggaggtggccttctgtatgaggcattgtcagaattccttttcctacaatttctctcagtatatcctattctgccacatctgaaacatctaggttcctagtgccttcttggcttcctgaggaaggctcttcccactgaaggtcctggttcatagtagtgataacctctggcctcttggtacctatgttgacttctgtaaggtacttcttcccaagctcctgtgtcattaccttgagaacatttaacttctttggatctctttaaaccttttgagattgcctctcctacccaaactcctgtatcttgtacattacagtagaggttagctgtatgcaaaacccattcttccagtggagctgatctgatctttaaaggcaaacgtattcttttgtatattggatttgcattttcataagctattgtgtatatgattgattttctggtttccagatatgttacctgtaattctactgccctagttaacctttgtaaaaagtcatggaactgttctgttggtccctgttctatcctgatttaactttctaccttttttcctggctcacgaaccttgtcccaggtattcaaggctgctgtcctgaataaggacaatatacggtcatcatattcagcctgtagattagcataaatgccctcacccagcatcttagccaggggagcttcataaccattctttattccttgaagctctaaggccttaaagagccctccactgtatctgagatgaatattcaagtacagcagatactaggcattcccaatccgtaggcgtcaccctattaaaggtcacccatgaattcaataattcttttcacataggaactatggagaccatatgaaacaactgactccttaattcccttaaagtctttcaattgtatgggttcctactgatatgtcatctgaccatgtggatgcttcttagatggcatttttttctgtcataatttctggaaacaacattggtgtacatatgacaaacttaggaaagttttcctggcattttaatggagtaggagcatcagattgagagtaatttaattctgtatcatccaaagcttataacctgtaaccatagtctcatgcagagattgaatttcatgagtcatgttagattctaagagtttcacagaatcagtaagtttctgtatttttacatctacctgtgcttctaattctttaatgttttcatcattagacagcatctgaatggcatataaactgccttccaaatatctaatcctagactctagcttgtcatttgcagcaatagattcctcaggcatggagctaactgcttgtcctaggtcaccaatcctgactcaattcctagctatttttgcattcaaataattggacattgatcaaagtttggtttctacttgggtatttgtcttttctactccagttagtaatgtattacagctattctcaacttcctttcataaataaatgttccatgtcttctattttagaattttctggctggcttttatatactgcatccaatttgctagactgtccgttttcctgtgtctcaatcctctggttagagatatcacatgaactataaagctgattgctaatacaggtacatcactgacaattcataagcctcctctaacattgaattcatataattagcaagaatattcccaactttccacatgctcagttattctgccatcctgcaagtttacctgtaccatacagctgcagtaactgtgtttgaccagcaggtggcaaaggatgctgattatgatgctgcagtggctgggcaggtgtctgaggcagcatcgaggctggacaccggcaggtggtggtgagtggtccctttgaaggatgtgcagctgctttgggtggctgcaggctgtggtggagcagtggctgggcagtgcatgggaggcaggcaggagcaagtcacagcattcagctgcaggaactggacgtgaagcccatctcaagactacctgaaaaatacctaaaccccttcccgaagtgagttagaatggacaggagggattgactgttggtatcagaaaagttttggataacctgcagggttatagtgggattctgagtacaggcggatgactctcaaccctgtggctcaacagggcagaaactgcatctttttcatgagcaacggcagtgctcagcacatggacggaggtcgagaggaaaacaaactctcccagcaaggctgagcattatccattgccaaggggcttcacagtgggccatgcctatggtggctgtaaatgctaataaggaaggggaggagccttaggtttccaaaatggaggatacccattgaaggcacatgtggtatgccttgtctcagtctcaagtcccagaagccatggggtagaaaccacaattggtccaaatggtgcaggcagagaccacactcggaggaaagaaacctctaggctgccaggacacagcaggtgctggggctgcacagagctcctctcattgcaaacggtgccagaaacactctgtggcagttagtgccacaggcgaagatgaaaagtaacctgggtgctgatatggcaggagaataaatcctgccagaagccaccacctgcccatgggttcaaaataaaactctgttgcaacaccattaccccacaccctgaggttcccagaggaagcagtgaacctgccacagcaacctgccctgtggagccactgtgtgacatcagagctgtcctgcgctcttgcgggttagactaggcattcccgagatggcctgcagccctcaagatttctagggttaggattctgcactctcactgcctagatctgcctttcagcaactagtcaagtgggaggcagaacctgggcagatggcggtagtgttatgaacttccatgtaaacttcacaaaaacttaaaaagagattttagcagcaaaagaacagagacaagcatgagttcttggtagcagcattttcttgggtgggttcttgttttgctagagacaagcagattcaagcagttactttaggagaggtttcctgactcagcgcaaggggaaaaaaaacgcaggactctttaagaggcctggctacctcagtaggtagagcatgagattcttactctcagggtcataggttcgtgtcccatgcagctggcagtggtagtgaccacatctccaataagcagcatgctccttgatggcagcatagaccaaggcagtgaacacagctctcagagctggtggtaacagtacctctgctatcttggatagacagtggctaaaaaagccgccactttgatttttagcagtgttgtttaacagttaaaagatgcaaggccagaataaggtaaagatttacattaaaaacagattcagaagaagaaaaacctctaaaggtttacactgtgtttaaaatatttgtaggcttgtcccagcactccagaagcagaggcaaacaggtctctgtgacttcaatgccagcccggagtacagagtgaattcaagggcagccaaaattatagaaagaaaccatgtctcataaaagaaaaaaaataaaagtaaaagaaatagagtaatatgaaagccatgtaaagatggaaaatacacagaatctggatactaatgctatattgttttctttaaattgtttgattgccaaagaaagagctacagctgctacaatacattcaattaccagtgctgctaaattaatccaacttaaacattttaaaaaagctttgacttcaaaatttaagtctaaggacaggctacttgcaaaaagatttcttgcttgtgtttccacagaaaatggaaagctatgggttccttccagactaatatggtttgataaagcaagaccccctgaagcaatggcccaactgatcctacatccaaaacagctgagatgatgcagactacaaaaaaaaggacctggccagatttctgtgtttttttcaggatctccatgacatcgcccccatccagcaggaagcagtttggaatgaaggacatccaaattcccaaatattgttcataaatgtttattttaatttaattggggttgcttataaatggcaacgatcacagtcaatctctttttaaagaaaaaaaaggggaataggatatggagatgaatactttacattggtatggattttcatttatggatacaactttaaggtcaaatttttatatgtatatgtgtcctcttgtctggtattgtgtttatacagatcttttaaaatgtaatacataattatatacagattatatagtcagctataatagtcaaaacttataattaggtttactacgtttcccagatatagagagatgcatttgagaaggacagatattcttcaaacctttcaaagacctacagaatatatggcatttaaatggtttagggtttttcttgacagtgagacacaactgctcctggcacaccagttacatcagaaaggaggatgggcattgaagaaaccattatggagtttgccttcaacatgacaagaagagacagagacgctggggtgaatttgcttctattttttctagaactttcagttgtgctgtttattctctgttgtgactattctctagtttcttcatgtgagcacttagagcaatgaactttcctattagtagtggcttcaaagtgtcctataagtttgtatatgttgtggttgcattttcatttaattctaggaagtctttaattcctttctttatttattccttggaccaggaatggtgcaattgtgcattattcaatttccatgagtttttaggttttctgcaatttgttttgttgttgaattctaacattaaagcacggtggtctgataagacacagggggttatttcaaattttttgtacctgttgaagtttgctatgttgccaaatatgtggtcaattttagagaaggttccatgtgttgctgaaaaaaaggtatattcttttgtgtgagtagacaccagaaaataatcaaactgaggtcagaaatcaataaagtcgaaacatagaaaacaattcaaggagtcaatgtaacaaaaagttcgacaaaatcaacaagatagacaagcctttatccacactaacccaaaggcgcagagagaatatgcgaattaacaaaatcagaaatgaaaagggggacataacaatagacactgaggaaatacagagaaacttcaggtcatacaatgaaaacctgtattccacaaaatttcaaaatttaaaagaaatggacaattttctagatagacatcacttaccaaaactgaatcaaaaacagataagcaacttaaacaaacctataacccctaaggaaatggaagcagtcatcaaaactctcacaaacaaatgaagcccagggacagatggcttcactgcagaattctaccagaaattcaaacaagagctaataccaatactcctcatattgttccatacaacagaagcagaaggttcattgccaaactgtttttacaaggctacaatatccttggtacacaagccacacaaagacacaactaataaagagaactacaaaccagtatccctcatgaacattgatgtaaaaatacccagtaaaatactggcaaaccaaatccaagaacatatcagaaaaatcatccaccatgatcaagtaggcttcatccccaggaagcagggttggttcaatatactaaaatccatcaatgtaatccaccatataaagaaatttcaaaagaaaaatcaaatgatcatctcactagatgcaaaaagcttttgacgaaatccaccaccccttcacgataaaggtcctggagagatcagggataacaaggatataacaggataacatgaacataataaaaacaatatacaataaaccaacagccaacatcaaactaaatggagagaaattcaatgtgattcctctaaaatcagaacaagacaaggctgtctactctcccaatgtctattcaatattgtacttgaagttctagctagagcaataagacaacaaaaggagataagggtatacaaattggaaaggaaaaggtcaagctttctctgtttgcagaggatatagtagtttacataagtgaccttaaaaactctaccagggaagttgtacagctgataaacacctttagcaaagtggcaggatacaaaattaactaaaaaaattcagtagacctattatatacaaaagataaatggcctgagaaagaaatcagaaaaatatcaccctttaaaatgccacaaataacacaaaatatcttggggtaacactaaccaaacaagtgaaaggcctataaagcaaaaacattgagtctttaaaaaagaaattaaagaagatatcagaaaatggaaagatctcccatgttcttggatagggaagatcaacatagtaaaaatggcaatcttgccaaaagcaatctacagattcaatggaatccccatcaaaatactggcacaattcttcacagacattgaaagaacaatactcatctttttatgaagaaacaaaagacccaggctagccaaaacaaccctgtacaataaaggaacttcctccatccctgacttcaagatctattatgccacactcactccagtagagtctgcatggcatgaagcaaatattgctaaaaacatgtccagacctgagacgtgtgcttgcgtagttaggtctcctggatgtccctggaaggaatctaaaaggacaagatgttctctgtgtctcgctgtctgtggtgggttgttttctggttttgtcttttgtcttatgactggtctgaccttctcagcatcagcagatgatcaggtgttggttgaagaaaggttaaatacctatagatattttgattccaggaactgatagcacctccccaacaatttctatacagtatgctatcattgaagtttcgtttgtacctgtggtccaagtggagcagttccttgctagggtggctcaggataaggacatttctactagaagccctgtgttagttagaactctatttgaaatgtttataacagaaaataaaagcttcagatcaattatgaatcaactccagcaagcagagttgtcttaccagatgtctaggaaaagtaaaagagaagttcaagaaggagatgattcagaaaacttaggggagcttggaattcctataaaggttgaattaggcagaacttattacaagattaataggaagtggtggcagcccctaaggaacaaaggtccatatttttataagacaacagctgcccctttgccatacacaggagcttaagataaagactttaattgctgggttgtcattgggggtgaaaagagattgtatatatcatttagcttgtgagagaaactaaaaagagcgagaccaccttatatgtcatgctgacaaaagagatattttatggcaaatgtatagctatttacattatcaatcagaagactttgtatggagacatacaggggataaaagggattttattgattgctttatgaagtttgtaaattggcctaaagaatcctaacattcagcatgatcatattttcagaatcacagccagctcagcaacttgaccactgtctggggccgagataattctgactaaaactgcttcctgtcatgtactttcgtcttaacatttgcttagagccagtaatgtctatgatacacattttttgtactcaagccaaagctgaagttcctgtattgcttgtataagttaaagtgatgaagtaaagatttttgcagcagcatcaaacctctcttgtgtttgtgtctgtctgtcatgccaaatccatcccaacctgagtaccaaaaccctgattctcctgcagtgtggttctatccctgagtggtctgcagcactattatagagctatagtcctgaaaacagcttggtattggcactaaaatagacaggtacatcaatggaatcaaaatgaaaaccccaaaattaatccacatacctataaatacctgcttttgacaaggaagctaaagttttatagtggaaaaaggaaagcatcttcaacaaatggtgctggcataactggtttctgccatgtggaagactggagacagatacatgtctatctccatgccccaaacataaatccaaatggatcaaagacctcaatataaatccagacacactgaacttcttagaagagaaattgggaagtacccttgaatgaactgctacaggagactggttcctcaacataatacctgtagcactgagtttgacaattaataaatgggacctcttgaaactgagaagcttctgtaaggcaaaggtcacagtccaaaacacaaaaaagcagcccacagaatgggaaaagataccaaacccacaactgacagagggctgttctccaaaatttacaaataacacaaggatctatcttccaaaacaccaaatcatctaattaaaaagtgggatacagaactaaatagggaattagtaatagaggaatcttaaatggctgaaagacacataagaaagtattcaacatccttagccatcagagaaatgcaactcaaaacaactctgagataccaatgttacccctgtcagaatgactaaaatcaaaaacaccaatgacaatttatgctggagagggtgtagactcctccactgctggttcgagggccaactcttacagccactttggaaatcagtacggcgattcatcaggaaaatgtgaatcagtctaccacaagattcagcaattctagtcgtacgcatatacccaaaagaagcacatttatacaacaagggcatatggtcatagcatcattattgtaacagccacacctggaagcaacctatacgccattcaactgaagaatggatagagaaaatgtgttccatttatacagcagagtactacaaagcagggaaaaaaaacaatggaatcttgaaattcacaggcaaatggaagaactagaagaatgcattctgagccaggtaacccaatcacaaaagacaaacatggtatatactcactcatatgtggattttggacatacagaaaagattaccagcctacaatccacactgtcagagaagctaggaaaaaagagaagaggaaagggtcaagatctcctgagaaaattgggagcacggagggaggggagagggagatagcagaaagcgaaggggataagaagagggtgaggcagacaagagggagcagggaggttgagatgggggaagaatagaggagatataccataatagagggagccattataggtttaaagtgaaatcaagcactagggaaatgtccagagatctacaattatgacacctactaacaatctaagcaacagtggagaggctgccttaagtgcccttccctgataatgagattgatgactaacttacatgccatcctggaaccttcatccagcagctggtggaagtagaagtagacacacacagctaaacactgaactgaactggaatccagttgcagagagggaggagtgatgagcaaaggggtcaagaccaggctggtgaaactcacagaaacagctgacctgaacaagggggagctcatggtccccagactgatagctggaaaatcagcataggactgatccagaccccatgaaggtgggtgtcagtgaggagacttcaggaatttatgctgcctcttgtagtagataagtacttatccctagcataggaatggactctgggagcccattctacatagagggatacttcctcagcctagacacacggaagagggcctaggccctatcccaaaggatatgacagactctgaatatcccccatggaagacctcaccctctttggggagcagaaagggaatgggataggtaggggggcaggggaggaggagagggagagggaactgggattaacatgtaaaacaatcttgtttctaatttaaataaaaattggaaaaacaaaacaaaaaaagaaacagagactcagggtattttctatagaattctgtctcctagcaacattaaaagctatatccataaatatctcaccagcatgactatccaatcatgggctgaaaaaggatgacaacactaagcatgccaatctagacagataaaaagcttatgaggcctccagctttcacaaaaaactataccctattgagaaaaactgggtgcagaagtagttttcccccatggaagaccatattaaacagatatccagtgccaatccatcagccctgaatatacatagaagtaacattatatggattgaactggttatatttagaaatatattcatatacatatgtgaggatgcatgtaataacaattagtaaaaaagaggatatgattttgaagaagagtagagagggttattctgaagagttgagaagtagggtagggaagggataagtgatgtaattatcttataatgtcaaaaagaacaggtgaatttcaaaaaagaagcatatttccatgtgatgttgtcatacaccatttagttaccacgccttttctgttctatcacctccccatctctgattaaacctcaatgatctcaagtcacattcttgtgttataaataatagaacatttgcatggatagttagcatacattacatacaagtcattggtttactatatttgctttactcggcaatctcctgagatttgggatttcttttcattccctgtgtattgtgaatacaactgcaaggattgtgtagtgccatagtttgttattgttgttgatatttctgttatttccaaactgatttaatttattttgactttttactgagtaataggatatgggattctccctaaaattatctgtaatgcttaggttaatctatattcctgcaagaagtatgcagtagctagcattctcaatgcctctgttatagtagattctgtgttaagttgactatcccacttccagaactatagacacttggcacacccgctcagattttacacagcaagtactttaaccatgagttatctcataatatttacagattttttttctaatttcatgagattgggaaagacagcaaaaagagtattgaaacatatctaagatgaaaatccaggaaatagtgatgaatgattcaacttgaactcaaatgcttcataatgaggagtgaaactaaaatttgtgtatttcttagatactgaggaaatgagagggcaagggagaagaaagggggataattaggactcggtaactaatttaaagaatgaagtagctcctttttccatgacttttgactctgtccaggagagcactcagttggtcaaatgatgatgaagattaatgtttttaaaactgggcctgcttctttcaagaagaacttttaaaatacagcattgtatcctagatattaaataaaattaaatgtttaccatattcatctggatattcctatgagttgagcacaattaaatgaacaaaacagtagacacctaacaaagtcatgctaaatttaatttggaaattttctgacatcatttgtgtaagttttcacaagaaaatatgagtgtgtcatcttttcagtgggttactttatgcgcttgattacattcatttgtgttgatgtgacagaaagagtactgaatgagatgattgaatatgataacacaaccaattatttttttcaacaaactggcataaaattaccataagtattttatataggtttcactcttctgaacaaatgttaacttatagacagccaacacactattgctgaggtaagatgtaacttcaagttcttgaatccagtggagtgtaggaaaatctaattcagtatatcgttaagataaaaggaattaacccagatattgtgcaaagcagaaagttaaaatcatagccataaacattatcttgacttaactacaatctttgtaaaggcactcttcacatctttattctttagactgtagaccagagggttcagcatggggatgaccatggtgtagaacacagatgaaattttatcaatgtccattgaatgactagagctgggctgcacatacatgaatgtgactgtcccatagaaaatggagacagccgtgaagtgggaagcacaagtagagagagctttgcgatatcctgcagcagagtgcatctttagtatgttggtaaaaatgaacatgtatgatattaagatgaatagaagagcacaaaatatattgaagctagctgcataaataagaaccagttcattgacatgtctttcagaacaagatacaatcattactgctagaacatcgcagaaaaaatggtggactacattggtctcacagaaggagagacttaatgcatccacagtacagatggcagcattcaggataccaaagatataacagccaatgactatacatgcacacacatttgttgtcatggtggtggcatagcgcaggggcttacacactgctacatagcgatcataggccattgagaccaaaaggtagttttctacattggcaaaggttgaaaaaaagaacatctgagaagcacaagcattgtaggacatgatcttatcttctgtaagcaatccagctatgacatttggagtgattgttgaagagtaacaaaagtccactaaggacaagttactgaggaaaatgtacatgggagtgtgaagtcgatagtccaagagaattaataaaaacattcccaggttcccagccagagtgatggtatagataaggaggaaggtaataaagagaggaagcttcagatgtgggttattggtgagtcccaacaggatgaaccatgtcacttctgtactgttctccatcaatgatatcagttaaccaatagaaaaccttaaacaattttttaaagagtacaataaggggctggggaggtggtgcagcaattacaagcactgcctatctattacaacggactcagcacatgcatggcagctcacaactatatggaactccagcacaaggggatctaacactgtcctacagcctcctgaagcatgaggcacacattgtgcaccaacatacatgtagataaagcgcccatacacatagaattatttttttaagttttttcccaagacttatttatgtatgtactttttatgtacatgagtgctctgtctcggtccatgagaagaggacatccaaacccattacagatggttttgcgacaccatgtggttgctgaaaattggacttgggacctctggaagagcagctagtgctcttaattgctgaactctctctctaggtctagaattaattttttaatcttttagatcaatgtaataaagttattgagatctggggaattttaattgtttttctctcaaaaactgaatatgcataatacatgtcagcaatatgtagagagtttagtaactctttgaacatggtttattttaatgtatctatgtcccagttcaattttcctgggctcattaaaactaacactactgtgcttccctaccaagaggtactatagaaacagcctgtgctctgtcaataatataatgactttgataaattttacatccatgtaaattaggaggcagaagagatataaattttctgcacatttaagtaatataattggcagtttctcttctgaaactgggtaaacttttcaccaattgcagacatatgatctgaaataatttaacttcattgtttttttcattttttattatttttaattactcatatttacatatccatcccctcattccctcaccctcccatcctccaatgttccccacctaacccaccccaacccactcctccccccccactcctccccagtgatagtgaggtcttttaccaaggacctttaaagtctgtctgggggaggatctagacattccttgctgtatctgggctgcaatagtatccctctatagggaatgggctcccaaagtccatttgtgctctatggagaaagactggctccgctgttagaggacccatagactgtcttggactcttacctggtacccatattcaaagggtttggtcttgtccaatgctgtttccccagttttatggagggctgagcaaaggatccaagacggggatggagagaccttcagaaacagtggaactgacctactgatagaatataacttcattataatgagtaattttattcttttgcttaatcaaataaactgagtggcacaccctgtagtaattttatcttggtcactatatagctgttctcattatagatcaagcaaatgagtagttcctaacagtgaaatgctttttcttagtattagaaggttcttaatgaagtgatgagcttgaatgacatttaattctttccacatgttttcatgcttttaattttacacctctagatacactgataagggtatatccagcagcatggtattatgattagctcaaagaaggctttatcttgaatcaatatttctcaatgctgtatataatagatttgttgatcttaaagttatgatgggagaatattcagctacatagggaagttagaatgaggaaatgtcattaattaaaacacagacagctcaagttctttaaagagatatatagcagatcatccaatgactacctagaacacacctacctcttctaaacaccatatttccatccacaaaatatagacaataatgagggatatttggggtattattgtgaaatgaagtagtatataaatggcaagaaaacattggttattaagcatgccttagtgagtactactgatctagttttcattactatgtgataacatatagagctttagttcttgttaagtcttgagcattccttctccaagctaccctttctgcatttgtaacactgtaactgtgtcttgtcatgaatctgtttgtttttattctaagcatatcaatgttggtcatgaaatctcactggaaatcattgtttacaaaatttcattctggtaatccataattttagatgaaatattcctcttttcttaaattttagtttcattttctaaatatatcatccatcagcaacaacagaaaccctggagcccaagctcagggtttctgagctttgtttatctcatagacatagcattcttatactctaataataattaaactttcttgtttggcttgaaatacttggaaggatatctactatgttattggctaccatcattttcttcagattttgaccactttaattatgtacgtatacctaaaaatatttagttgcaaatctaacctcatatgataactttcacattttgtacattattttcaaatggtgtgtgtgtgtgtgtgtgtgtgtgtgtgtgtgtgtgtgtgtgtaaagtagaatttaaagtattatttcctacttaatttataagaaaacttaatatctaagaaatttcatggtaatcttgatttttgtaagcagtatgaaaaacacttagggttcaacagttaaggtctggtacaggggaaatgttaggagagccacaaggatgacccaaactaagaatccaggcagtggtggagaagatgccattgatgttcttcccctataatgagattgatgtctatcttggttaccattcctaaagccttcatccagtagctgttctaagcagaaacaggcacccacagctaagcactgaaccatactcctggaatccagttgtggagagggaggagggatgagcaaaggagccaagacggttctgcagaaacccgaagaaacagtggacctgacctagtgagagcatggacaccctaatcataaagctggggaaacagcattggaccaaaccaagccctctgaatgtgggtgccagttaggaggtcaagacattctatgggacctctaacagtggagccagtctttaaccctagagcacaaatggactttgggtgcccattccctatggagggatactattgcagcccagatacagcaaggagggcctaggccctcccccaaatgatatgacagactttaaaggtccctggtggagggcctcactatccctggggaagagttgggggatgggttggggtggttggtgaggacatgggaggatgggcagttgagggaatgaggggatggatatgtaaatatgagtagtaattaaagaatttaaaatattccatccaataatgagcctgacctcatggcataagggttaaattaatataaggattgagtgaatgttcatttatttctaacctttcatcagtatgcataatgattattttatcttctgggtttgtttgtgtcttttgtgattttttaatatccaagtatattaaacttctgctgaacaaaataaagttacaacaatgaaattacattttatattctttctaagaagaataatttttatatgaatcatcaactatctggtagcattttgacattaatatttagattcaacatttcaaaactagttttagaataataacctttagcctttgaactgttttaactatcaaaactattttcaaacaactgttctcaagaaactcatagtagctatacaaagaccacttttttgttgggaatatacttctcactattatggttatgaaatgtaggttgtcagtttttagtagggcaaactctcatgtatcctcttccaagagcttgctcttagaaagtggttatgtttcaatcttgtataaaggaagagtgtaggacagaacttctgcacacaccaagttctgaattcaacatgtattactcatttttcctcaggagagtcacttacctccttgttaggaaaacatagtacaggaaaaccagacaacatcactcccctcccatagttcataggttatatctgtatacttaaagaaaaaagaaaaacagaagttagtaaagaaacccatgaagagtttgccagataatagtcaatcaatgtgaagattgttggtgaggtttttcccttaccttgcttgaaggcccatagctgatcatcaagttacataaaagatccgcatgtgttaacaattactgccactcagaaaataaataaaatctaatggataatggcattcagtgtgtcccctggtgtgccacattggtatttcagaggctagtgaatggagatgtagagagaaatataaacaaccagagaactctggagagttgccccagtgtgtatctgaagatcttcatcctgtcttcttagggaaatagcaattaacaggccttagagaccaaaatggtttctggatcttagacattaaatttccctttaaaagggtaaatggaaacacaaaagtcacacataccaatgaagtatcatgcaatgtttctatacccaatgtctgatataaaaagttcaaattaggtcaagaatgcctgtcttctcagcaatttttttgtggtgaaactttaaaactacttctttctatcttttccttttgacatttcttctactgtttccaaaaatataatacattattgtgatctatagtaaccccatgcacaataacacatctcaacttcttgttctcagcaaactataccttgttataatatctaatcattcctgatcattcttttatatgttgtctcttataacactctgcagaatgttttgtgtcatgttttacaaaaatgtccacttaatttctatttaccattatttttattacattaaagttttatttatttagtcatttactcacttatgatgtttgtgtatagaaagcagaataacttgcagaaataagttctctccttgacacatgtgggttccaggaattgaacacagatcatcagagttggaaataaaatcctttaccccctgagccatctcaccactgcccattaattaattatttattattgagttttataattatattttatctgcaaatcaacctcttttaaggtgcacaatttttacttgttttttacattttgtaaagtatctaatttgttctgtaggccattttctttaccaagcagaatttttctaccttgagacaatcctattttttctttgtttctatgtgtttaagttttctgtgtggtcatctgttaagcaaaacaagaaaaagaaatactccattgcaatgcaatgtctcaagtgtctccctctattatttttagagattttgtctttcatttaagtcattcctttatattgagtatagtcttgtagctggcaaggtgagctgtatgtagttttcaacttcgtgtgtatattttggtctctaaatatatttattgaagacagtcactttttccagcgtattcttttggaaaaatttcaagcattagtttgctatggatatatgactttaactctagaatctctgttttgttaatctttgggatcaatttgatcatagtaagtactttttctaaagaacttcttgacttagtttctaagtaccttgtcaaggatattttttacctataatcatcaaagattttgagttgccacattacctttcattgtttcctgtattagcttcctttcctatagttgtaataaaatgtcctgacaaaagcaacttaaaatttaggtagttaacttgggtcacaattccaggttatagtgcatcattacaatgaactcaagtctgcaggaaactgaagtagcttctctaattaatcacaatcaagagcagagaacaatacattaatgctgcatgcaaatgatcagctcactttctcaactcttataaaaatccaggatcccctatacaatatccaggatcccctgttcaaagaagaatgccacccacagtgcatagatcatccaataattcaaaacaacccccatagacattcataggtcagcttaatctagacaattcctcacagagactcccttcccaggtgactctagattttgtcaagctgccaaaactaaccatcacatattcctatctgacactgataatgagttaaagctagtgccatagaatgttttgaattaatttattcctcacctatagcttttatgtagtaaaaaattaagacatgttaaatatagaaataggtaattatattaaattctccctttttttctttcttctatccaacccttctgatatattccaaatacaaatgaataaatgacctcaacataaaactagacacactttacctgatagaataaaaattagggattagccttcaacttattggctcacaagtcaatttcctgaagaggacaatgatggtgcaggcactaatgtcaacaattaacaagtgtgacctcataacactgaaaagtttctgcatggcagatgatgctgtccaacaaagcaacaacctacagaataggaaaaggggaaaggggtgtttttttccagttccacatttgatagaggactaatcccggaaaatgtgtaaagacctcaagaaatatatattaaaaaataaaatccgtatttttaaaaaagtagagatcttaaaagttcttaatctaggaaatggctgtctgagaaacaaagaaaggttaaatactcttggttatcatggaaatgcaaagcaaaactaatttaaagctcctatgcctgtcagaatggctgagatcaataatacaagtgatagctcatattggtaaggatgttgaataagaggagcaccgacttattgcaagtgagagcacaaagtacagccactatggaaatcaatgttgcagatcctgaaaaatatggtaattgatctacttcaagacccatccctatcactcttgggcataaatccaatggatgcttcctcctaccacaaggacaatttctcaatcatgttaattgctattctactaattataggcagaaattggaaacagcctagatgtccctcaacagaagaagagctgaagaaaatgtacatttgctttacatatctgtcaaaaaaataacatcatgaaatttgcagacaaatgagtagatagaatttgaaaaaagtactgagctgtttaagcgaggagaactgccaagtcagttccggcagagagcgaggcgagctagggagtgtggcctcctccttccttcgcccccccccgccccccaccgcctctggcctgctccgggtgagccggggtggggtgggggtgggcaggagcagctccggccctggggaccccaggagcccgagccctcacagaggcgccggcccggccgatccgcgacccaacagagactcttcctccgccaatgaagccccgggatggcggcgccctctgcgcgcggcctcctcgaccccgccggacccctgctctccagggccggaccatgcagaagccccagccggccttggaggactccccccggagtgggcgggcgtggcatggctggaagaatggtggccacccgaaggccaaggttggcccttcggggcctctgcagcctgaggcggcggatctgcgcagagcactgggccatcgctgcgagggacccgcccggttgaggaacccttagacctggatcaacagagttctccacgatcctggaggaagcatagcggccggaggaacgacggatcgtgggggcgcgggtcctccttccacccgagagaagccgggacgtgacatcgcatgcggccggtcagaaacgctggcgaagatgcacccgccgccgtagaaggccttgtatataatatggaaaagctgctctacctttccccccgaccctttatagagacctttggctaaatctggacatctagctagctgtagagattgccgacgcagggtaaagtagaggtaggacatcacatgtgtgtatccagtcgtctttaaaaacatcgtagacgtgtcttccagaagtgactttgcaatggaattgttgaagccacctctagaaaagaccccaggagcgacactcgtcctagtttgttcaataggttagaggacccagcaggaggaagaggaggtccggagccagattggtcgtgtgaagacgtctttgtattctatggcattgtgtatgcattttattcatttcaatcgccccccccccgtgtgtgtgtgtgtgtgcttgcgtgcgtgtgtgtgtgtgtgtgtgtgtgtgtgtgtgtgtgtgtgtgtgtgtgtggtgtggtgtgtgttgacaatgccaagtattttttgggaaatatctttctagatactctaaagtgcctgacatattttattagtagtaaaacaatacattatgtaaatacatttttgttaggattcatttgaaatattgtttggggaggaatagccaaagccctcctgatttgaccacattgtgtttgttccctggtttccaggagaaggaaatgtacagctctaagtcattgtgctccatgggtggaaaaaaacctactgtcccatttcgtttggctttgctgtgtacatagtatatataaaggacaaaggagtcctattctcagcatctagtcactctagatgttaaagaggttgccagtgtatgacaaagtagaggtagtagaacaatattttgtacttttgtgttaaattttttctttttgtgttaaatttttaattattactcttgtaacatgtgtgctgtgtacatagtggacaacagtccttatttgaaacatctggtctatccagatgtttagaagtgcccaacgtatgctaaatgtagaggtagtaaaatatcactttgtaaatatccttttgctaaaattcatgaaatgctgtctttgggagtagaattatgagcccctctgagcagtactgtctgtatttactcagtgctctggaggaagcgctgggagacatcgaggtagtgttttttatatgggacctttgcaaatgccacttctatatatttgcattttgttttgctctgtgtatactatatataatggacatatgtcagcttctactctgtaaatattaaagaggctgccagtgtatgacaaaattagcacattgtgtacactgttaaaatttataggaaagattgctgtgtgaatgatttggggacatgaatttgttcagcaatttctaagcattgcatatgcctatatttgtcactggtttgacggcagagagaagggagaaaagaagaaagtgggtcaaagcccagatggttacgtttagaagatacctcagattataaccattgctttacatagttttatttactagtgcagtatgaatagcagataagtttacattcaaaagtagaagtagtagaataaaacttcatgtaaataagttttgaaaaactggagatactatgtttagaagtagaattgctaacccacctctgagaacagtaccagctgtacttgttcagtggattgaggtggggggcaagaaactgcaaaaagattccattagtgtgctagatagttttagcttacccatcaccccctgtatttgcttcatttaacttggctatactgtatatattgtatatactggacaaaggagtcctaattttagtttctaggtattaaagaggttgccagtgtatggcaaaagtagagtcagtaaactagcccattctatatactctgtattaaaagccataacaaggttgtcttctgaaaggagttgtgaaagtatcatccaaatgtcaggtgcctgtgtcacatgatacaggggaggggctagagagaaaggaggtgggagaccagaatgctctcagcagaggacactttgagatctactcattgttacatgtgtgtggtttcaacactactctgtatataggagacacatttatgtcctcatctgaaacatctagtccttctaggggtttagaaatgcacaaagtatgttaaaggtacatgcagtaaataatacatattgtagattatcctgtagattattctgtttaaactggtggtgaaatgctgtcttttggaaatggaatgctaaaatcacttctgagcaatatagatgtgtgctggtttgggagggagaaagaaagagttatgaagggcctaatactaatgtaagttttggtaatgaagattagccattgtcccttttatctgtgcatcttatttttgcaatgtgtggtgtataataggacaaacaagtccaaatatgcagcacttagtcttcctaaatggtgaagaggctgccaatgtgtgacaaagtagagttagtgaaaagacatgttttaaagttgtgttaaaattcataggaaaaaactcaaaaccatttaggatgtgaaattgttaatatcctcacaaaaaaataaaaaaaaaacataagttacataaactgggttgagagagatggggagagggtctagaccagaatgttgctgtatagagatatgtgcagtttatttactgcactgcattgtacatatgctggggaaacagaagtgttagtggaaacatctagtctttagacttttaagtgcataatagatatggtgtggtaatgcatacctttaatcctaggttgaggcaggtggatcttgtgagtcccaggccagccagggctacatagacagtaagaaaatgtgcataatggactgttgggatggcccagcacataaaggggcttgccacacagcttgtagcctgagtttgctctctaggatccccataatgaaaggagaaaagtaattcacaaattatcttatagccttatataagtggcatgcatgtgcccacaagtactaattaaatgtaaaaaaaactgcacatgttaaaaataaagagttaacaccttttaaggattattatttcataggaatggttatgggtggtgtggaattgttgagctttatctttgagcagatactgttaccaggtggaggcgaataggggaaagaatagtgcagggcaaggcactgcctgttggttggttccactggcctagccactgttcctgtgtacatttcagttaatgttgaatgttgccaagtattagaggataagtcccagtgcccaaaagaagggctgtcttctgggggtgacctttgtatgactggcagcatcctggacaggagtcgggcaaagaagaggacggatgaagaaagagctctttgctaggaccaccccatctagaaaacagctgtacccagggatccatatgtgcagatacttgtgtttattgtgtacaaagttcatcccacaacatctgaacttcatgaatgtcctaaaggagagcatatggttaaaagtatagcttcatagattgacagaaaaggtgcctctgaattgctatgccatgtctggacagtgtgagttaattcatgttgcttggctgactggtgaggcagagaggttcacagggcgagatctgcggcactgtgctgtgttgagattgacatcctgaggacccctgccataggtgcatcttcggtgctccatgggaatacatttattgagcaggaacacaccttcgtattttagtatatagatctggtgataaacttaggaatgctgtactcagttggtctgttgctttgtgtttccttataaggtgaacattaagggaatgcagaattttaattgtaacttcgccagtacttctatctagaagcctgctgccatttttgtcttctatgaaatttttgttgccaaggaagacagaattacagtcttgtctgacagattgagatggtgtggtgtactcttggttatcaaaatactcatgtagagttggggtttttagttggtggatattcacaatgtgggggaaagcttgatacatattgtataatcttaattccctaaatgtgtgtacattgcagcatctagaaggacacagcaagctgagctgcttgtgactgggagactgttcttggctttttgtgttttgtttcctgtaatgcacatactacaaaataaataaaagcatcttttaaaagcttatccaatgatctgaaatttgtaagtctgagcagaggctagaacaacagatcactgtataacagaatatattaaacaacctacaaatcatcatttgaaaaacataaaaaatataaattcctgaatatatgtacattaacaaaattaacgtcagaaatgacaagacaaatacagacattaagttagcaatgacaaacattcaaataaagacaattaaaggataggaaatttttgtggtaaattctcccaatatatagtcatagtcatagctgagtacaaagtaatgtctgagtacaaaaaaaaagataagctaatgactttcattagattcttatggctgctgaaacaaagcatagaaaaacttaaaacagtccagtgcacaaccttagaggtatatttcaatagtgataacaaatccagtctagttgacagtgaagattaactatgatactataccaggaggagaaaggaaaaagaaactgttgaatgtatcaataaaggtaaaaatgtttttgacaaatcaaactaaaatatgcttctaaacataatattccttgattcccaggacaaaatgaaatccagaggcatgaataagtactcagatcttgaagcagtatgttcaaagtatagcacagtaatcagaagatctgataaatgtgaattttaatattgtatatcacaaaatatttaaagtcataaccataatggttatttttcctttagaaccatttcatgaatgctctcttaacctccttgttcctcagactgtaaactagagggttcagcatggggatgaccatggtgtagaacactgacacaattttgtcagtgtccattgcatgtctagagctgggttgcaaatacatgaagataattgttccatagaaaatagaaactgcagtgaagtgggagatacaggtggaaatagccttttgatatcctgttcctgaatgcatctttaatattgttataataattatgctgtaggataacaatattattgtaagagcaaaaaagatagtgaagctggctagacaaataagaactagctcattaatatgactatcagagcaagagagagccatgactgctggcatatcacagaaaaaatgatggaccacataggagttacaaaaggatagacttaatgtgtttccggtatagatacaggcactcagaaagccacaggcatagcatcctgtaatcagccatgcacaaatacctgtagtcatggtggtggtatagtgtaggggcttacacacagctgcatagcgatcataggccattgaagccaacaggtaattttctaccgtagcaaatcctgcaaaaaagaacatctgagcagcacagtcattgtaagacattatcttgtctcctactaggagcccagccatgactttgggggtgatagctgaagagtagccaagatcaacgagggaaagattacccagaaaaatgtacatgggagtatgaagccgagagtccaagagaatcagaaggaacatccccaggttccccaatagggtaatgatgtagatgaagaagaaggtgataaaaaggggaagctgaaggcctggggtgttggtgagtcctatgaggaagaactgtgtcacttctgtcatgttcttcataattgttttctcacagactatggatgctatctgacaattagaaagaaaaataatataataatgaacataaaattgatacatataaatacaagatatagacattcatttctttgaaaagaatctctccaaagcctggactttgaatgccaatttaatgtgtttaatgtgctagctacatatatctatagctagtaaatctgaaaagattttatgaagagtacattcaatttaaaagttgtatctgtcagtaggcaaagaatgaaagaccttggagcaccttatgctaaatgagatgtccccagaaaagccctccccacggggctcaaggaactgtgtggtagagaatgtggaaagattgtaagaggtaaaggggatggatgactccaagaaaacagtatcttccagacacaacaggacagatatagatatgaactcacagggactatgacaggatgcataagttcaagccagatggggtttcaacatggagaagggaaagtggacacagactgtgacttataagaagaagctttctataaataatacacactggcaaagataaaattccattttccaaaacagtcttactgggcatatcaaccagcaggtatcaggactaggggtagttggcctacacaaaatgaacttcatagattttctgacctttttttttgtaaattgggaggtatttttggcaatttttatgcttttggcattttgattggtttgagttttatttttgtgggattttttgagatgcagatataacatttgggggtagagatgggtctaggaggagttaggggaggagaaaaagataatcaaaatttattgcatgaaaaaagttagagagaaaaatattttttcatatgcacgctaattattaaaaatttaaatagacaacaaataaatataccttctagttcattctgaactcaataaagtttgacaattccacatttatcatctgccaagaattgatttaaacagttagattgaatttactctcttctgtcaattatatgaataaaagaaaatgattaaacaaagtctcactctgttaattcattaagggccattttatcatttaaaaaagaatcattttcattattaaaaaaataaaagtaaaaaagaataattttcttttacctatggtgaatatatatatatatatatatatatatatatatatatatacatgactttatttttcaactatgggaaatagtatttttatttttcagtagtgtatctgctcctgtactgacatgaattatacttcttactgtatattcatccttaccagttgtcttgaggatgaaaaatttatttacccagatcactcagtctgctcttatgtccagttgtggaatgtgacataaatgtgattataggcatatgctcccttagtagtattcaacaaattctcagttacctgcagaaaaaataaaagaatgagcattaacatgcatcaatatcctagttgaccataatttctctcttcttcataggtaatgtcacaccagccacatattttggagattttagctgtaggactaattacaagacttcactgaaaatctcaaaacaaagttaacaatttagaagtatgtcagtctaatgcttattttttaattcaaaagtttatcagtgtaatatttatctttgtatattttctcccaccatggttgaggctcctagctaatcctgttttcagaagactttatgattaattattaaaactgaaataaaaacattgaccaactaagcatggcatgaagtttatctcctcaaaactgtggtatggaattgtatttgtgatttggaaactcttgtgtgaagatctggagtaaattatacagatctggcaagctctggagacttacctcaggagtctacccgcagtttctgccctacattgtgtggaagcagtaaatgacccatgggaattgcattggttactttattgtgcatacatctttttgcattaatattagcaattggttttgaactttgaaatgtgtaatgattttttattttatgctcatttgggaacattctataacatatatcgagaaattttcttagcatataattttaatgggtattttattttaatagaaaatagattcttttctcatacaataaatccttaccacagtttctattgtacttcaaaccagtgtgcaaagtaatggacttttcactatggcatttttatacctttgtttttggtggttcacctccctagtccattattttatctccttataccactttatgcaggcaccattctttctcccagcaatgctccttcttcagaaaacagttttgttctttaacaactacagtgttaccatctcaattcaatcctaagaattaagttttggaacaagtgttagattcatgtatttaactatatatgatcataggaattattaaatatattctaaaatgcaaatttgtaatggaatgtacctttcccgtccaaaaacatatacaaactaagaaaggtaaatataaagaaacatgcacacatacactacaatgaaactataggtcaaatgtaatgtcacagaacctcaagaaacacaagtttttatagccacagggaaaagatacttagacaggagatggaggatttctccatcacaaaacatggaagtcacaaaaagtaggagaacttgaagatttaaaaaagacagcaaccagctttgaaggcagatgggggaatatattcttgggagctgaaactggtgctgattgtttttttctattaaatgttaatggtgtaattatttcaaagtggatttttcagcctccataagtgcatggaattaattccaaacaacaaatgtctccttctttctgactctctgtctatctaatctttgtctaaacaaacacacaaacatatacatacacacacaccatacacaactacacactttttatttctgtaatcatggaatgacagcgattgatataaccaataagattaatatgcaaatgaggtgttactcaataggtaaatagctacaaaaattcaaataagctcaaaataaactgtgatgtaaaatttgtaaaaaatgcacaagatgagagacatccaagtgggagatggcagtacagatatcgtgtagcttaagcaataagggaagtataacacaataaataaaagacccaaagatagatattgggttcaaacttcaacctgaaatcagaaaagcaaagtaactgtctactagctcttatgctatattaaactgaaagtcagtactggctgcataaaaccttagactgctgcctctcctcagcatggctggagaatcccgagacttcaatgtcttcctatcctcaatttgactggagaattaataccttcctatcctcaaagtcaatggagaataaatcccagctctgagaccatgttcctgtcttaaatacctccctaatcctgggactaaaggtgtgtgatcccaggtgctaggatcaaaagcatgagctctgttactcttcacttttgtatagaacagagagctgtctacctcttcatcctgagtcctgggattcaaggtgtgtacctttaatctctatatcttgagactgactttgcttcctcaatcttcaggcaagctttaggaaattataaataatatatcaccacaattctccttttttgtctaacacaaaagaaaaactattgacataagaaaaattacatacaataagtagtaattatatacactatatacaggcaataagtttgtcaacaatgtctagtccatttacatttgacaaactcagagaaaatatagcaatcacagggacacatattcacatagtgcaaaggaatattccacattccccattttacagttgggcctgagtttcagtttcttaaaagaaaaatgagacaacacatacacaaagatgagggagatagcatgtactaggcctcagccagtccccacagtatctcaaggcagtgtccaaaaagaaaagttcctataacctctctaataccttttttgcccaagtatgttataaaatagtaaaactataaccacaaccaattaaaaatgtactacaccctccttaaacaattatatttgagatgacataactgttcctagaattctcataactgagcttaaaaggggcctgtatactcctttgggggtcaccattttgtgtaaatggtagaacccctcatgctagaataaatgctctttgctttcacatgctatttgagtagggtcttcttcaacaattcttggacccttacagtgacaagttacatgtgaaaaaggtctgaaaggaatgagagccattctcaaagggaagtgaaaggtcctgaggcaagatcattatagtaaatataaagaacaagcaacaataagaatggggataagaaaagagagaatgagagtcaactaatatagaaaatgaatgctagatctttcagaaaagaaagtacacattacctcttttttaatacagagggtatagaatactatagcataggcaggtgaaaggcagctacaggatacttaggtcctcacatcccattcttgatgaagacacccacaagtcagactatatcctcattgcacaggcaggtaaaagaaagccaaaagcccaactaagtcatcaaagacctgggctgaccgaaaacttgcagagacatggttggggtctcatagcacatgtgggtgaaatacaactacaagtctgcctgggtcctcactgcccaggtaggtaaaagaaagccacaggcccatgtgagttttcaagatcctgggctatcataagacatccatggacttgctaggatctgcacagccctagcaggtaaaagacagacacaagatcacctgggtccacaaagtctcaggatagctgaagatattcacaggcaagactgggtccttgtagtccaggcaggtgaaagacagtcacaggtatgccttagtgctaaaggcccaggcacgtgaaaaattgcccacaggcacacttgggtcagcacatccctggctggctggatacatctgtaatctcctcaggtcctcacatctggaacaggaaaagacagccacagacatgcctttgtcatcaaggctcagggttggctgaagacatccacaggcctgcctgggtcctcacagcccaagctagtgaaagacagccacaaatccacctgggtcctcattggctaggtaggtaaaagacagtcagaggcctggatggatccttaaggaacagtcagatgaaagataaccacaggcctgcctgtgatggggatgttattctgtatatatgtttctcttattggttgatgaataaaacactgattgaccagtagccaggcaggaagtataggtggggctaccagatgaggaggatgctgggtagaggaaggatagagtgagctgcagaggagatgccatgtaactgaaaaaggagcaacaggtctggacctttctctggtgagataagaccatgtggaagtacttagattaatagaaatgggtaaataattaagagagagctggctataagaagtctgagccattggccaaacagtttataattaatatgtccctgtgtgcttatttggggctaatcagcagaaggaccaggcagaaaagaaattccatctacatgcctgggtcctcacttcctcagtgggtgaaagacagcctcgtgtcctcaatggtcctcaaggctaaggcaggtgaaagacagccacaagcacatctacattgtcacagtcctgggctggctttttacctagcttctcacacctgggacagtaaaagacaaccacagtcctacatgattcctcaagacccaggtgtttgaaaaacagacaaaggcatgcatgtgtcaccatgactcaggtaggtaagacagccacaggaccacctagattccatgtcccacttgggtcaaagacaaccagatgtctccctggatcctcttggaccatggcttgctgaagacaaccagaggccagcctgggtccccacatccccaaggcccaggcagatgaaagacagccacaggcctgcctggttcatcaaagcccaggaagatgaaagatagccagaagcaagcatgaatcatcatgaccccaggatggctgaagacatccatgggcctgcctaagttctcacggcgtaagtgggtaaaagggccctcatggattctcaaggcccaggcaggtaaaagacagcctcaggctcgactggatcctcatggcccaggaggatgaaacacagccagagatatgcctgatcctcttgtcctgaggatggctaaagatacctatagcctcccccaccatgtcctcaaggcccaagtgagtaaaagacagccccagccctgggatagctgaatacacccatagtccacctgggtcttcacaccaaggacagtgaaaaatagcttcaggccagcctggttccttaagacccagacaggtgaaacagccagaatcacacttgagtcatcatggcccaggcctggctgaagacattcataggccctcgtaagtctcatggcccagtcacatctcagggctgactaaatacatccataatctacctggttcctcacacacaagatagtgaaaggcagtcacaagccttcctaggtcctcatggcctaggacgtgatgggtaatgaatgtccttctgtgtatgtttatcctattgattgttgaataaagtactgtttggccaatgaggcagtaagttaggtgggactaagagaccaggaggattctgggaaatgtagtaaaaagaagtcttgtcatacaggcaggaagtgacatagcaagcagattcatatataagcaagcataaacaggaagtcgtcctctttctctcttgctcctcctcctcctcctgctctctgctctggagtcaccatgtgatgagcctaggaagaggacggcagcagaaggctgcctccataagataagtcttatggttatagttgataattaagactgacctagcattggccaagcagcatttgtacctactataagtctctctgtgttacttgggaccttaatgtggcagtggcaggcagaactcaggtggcctggcagaaagcacacacgtggtggcagagcttgggtggatggagtaaagacttaacgttacaaggactggctgaagatatctacaggcctgcttgtgtccccaaggccctgatggatgaaagatagccacagaccctcttggggcaccatggccccacattggctgaagacattcacattctgcctgggtcctcagggcttaggtgggtgaaagacagctgctacagattggcctgggtactcaggacttggggatggctgaagacataaataggcccttgggtatcctcacaggccaggcatgtgaaagacatctacagaactgatcaagtcttcatagcccatgtggacaaatgacaaccacaagcccacctagatccccacacccagtacatggaaaggacactacacgcctacctgggacctcaagagccatgtgagtgaaagtcagccagaggcaagcctttgtcatcactgccccagactgactgaagatatacacaggcccacctaggttcccatagccatcgtgagtgaaggtcacttgcaagcctgagtcctcacttctctgggatggctgaagacaaacacaggcctgcctgggtcctcactgttcagaaatatgaaaggccagcacaggcccaccttggttgtcagggccctgggatgtctgagtacatcccctatctgcctgcgtattctcacagaggacaatgaaagacagccagaggcatgtctggttcctcaaggcccaggagggtgaaagacagccatgagctcatttggattgtcaagccccagtgctggctaaattaatccacagtctatcttgatcctcatacccaggacactgaaaaacagccacaggcctgccttggagcccaggctggtgaagcatagccagaggcatgccagaggcattatgacacaggtttggctcaagatatccatacccctgtcagggtcctcatagccacaggtggtgaaagacaaccatagacccactgggtcctcactgttctgggtccatgttggtgtccaagagccatgatgctacctggagccatggtgtcatctggacccaggcttcaactgagggccatgtttgggtctgtggtcttagagaagacagggtctgaggtcctacaaaagacagggtctaagttgatgaccatgatttcagttataccgaagggtcattcagatgatgcccatggtctgctcagccagctgaaaccatgttggtgtcagaggaccatggtgctgcttgagacattctgatctgggtggcctgtgctgccacctggggccatggtgatcagggactgagctacagctgagggccatgcctgggtctgtggccctaatgttgtcagggtctgtagagatatccatggctcctgttactactaatggccatgcatatacctggcatctagtcagctaccagaaaccatgttggtgtcttagggccatgctgccactgaggctaaactgatctgggtaatgtgggcagctactggtgccgtggtaacatccaggccagagctgctgcctaggaccatgtctaggtccatggccctcctgcagctggggtctgtgctgatcttcatggaatatgataccacagggaccataggaaccaatgcatgtgtgttacgataaatctttctgccaaaagccgccgagccccaccgccacgtgcatgctttatgccagctgcctgccagagttagggccccaattaatgcacagggagacttgtattaggtacaaatgctgcttggccaattactgggattcctcatctgttagctcagtcttaattatcacaaacctatatattttataagacttatcttattgaagatgctttttgctggcaccctctcttgctggtggctcacatggtgccactggaggaggaaggggaaaaaggacactttctgtttctccttgcttcaatatgagtctccttgctgtgtcacttccggcctggatcaccacttctctactacattttgcagaatcctctttgactcctagtcctgtctaacttgctgtttcattggccaagcagtatttaattcaataatcaataagatgaacatacacagtacattccccatcatatgtggaaatctgagggtcatgctgacacagcaccaccctatactggtcctgttcctctctggccccttgcagcagaagagttggccttgtcattcatggaagaactggaccaacactcaggagagatggccccaccccctcactacaggaatggtagagctggccctgttggcattggtgtataagaactgggtccacccctcacttgagggaggcatccacagcagcccagactgaccaaatcagctaccaatcagatgcacatccagggatttgagttgccccaccccagcaaccacacgatccatgacctactggagggtgtgaagggactggtcctacagaacaatggctacaggatcttcatgatttgggcaatggcaagatatctgggagtagtttcagtaaggatccagtattgtgtaccagaagccagaggctttgaaccagaccaacaactcattgcaatgaacattggcaagtaaagcaataaaagatatactgtgtgatacaatgcaggtcccaatgacattaagatgaatgaagagattttggagaggcaggaaggatggagaagtaaagtggttttttgttttgctttgtttttaattaatatttcttacatttttcctatgggggacattctacaggggtaagggatggatattgagggactgggaaatcagaaggattgaggttcatgatgagaaattcccaaataatcagcttaaaaacattttaaatgagtctagaatatgtagtaatagataaaaagattgttctcaaaactttattatgtttatgtatactctgacaagttatccttatgaaaattaaaacatgaatctattggctgtattaaaggacatgatcaagcaggagtactaattaataggagatgtcagaatagttcatctttcagtaaaatatacaaaaataacacacactgtcatttaacaatgattattctgaaactggactactagaatgtcaatgaaataattaaatgatatgaaaaatttatatcattatgtcaaatcagaattaaaattttcagcaattaatacatctgaattttttctgtgttctccagtgaaacaaaagcatataaaagtgtgtgtatttcacacacatatttatgaagcaggacatttattatgagtatggtttcatgtgataatgaagtgtataaacccccccaaaattcctaataatctaaggaataaagaaaacaagtagttaattgactgaattcagcatgcgaagaaaggggagagtgagagggctaacttaaatcctgacgcttagagagaagtactcatatcaaagagtaaaagaggatatatgtttcaattaaaaggaggggaaagatgggaagagggatatcgggagggaatgaagaaaggcgaaaggaagaagataggaggggagagagaatggaagagaagaaaaggtaagaggagagaaccagctacaaagacagtgagaggaagaagtggccctttgtctgatttctgttctattcagtagagccaacaatggatgagatgctggtcacaaacattgatgagaaaaaatctttataaatctactgctgtgagtataagattcaagaaaacttttttcagacatgagtatataaatatcttattatttacctgagtaaatgtgaatccagtaaaattaaccaatgatatcaaactccagagaaggcatgttccatttaaatccaaaacataaaccacatcccttagtgtctctcattataagttgcccacatgcatattttctgttcaaatgcttatttctgcatttatatgtgcttttgtattaatatgttactttgaggtgcctagaaaatgaagataattcatcaatattctggctgaatgtttatgtaaacatcccctgagatgttttacacattctcatacagatatgtgtttctggacacaactttttctattttattttatttgtttgcttttgtaaaacaatggttcctggattttgcataaaaagtggattttaaatataattcaataactagataatattagaaaagactgtatccaagtatcatgaatctctgaaatgataaatcagagtcaaaaagatcattttgcctccagaacaatctttgtgaatgcgcccttcacctctttgttcctcaggctgtaaaccagagggttcaacatggggatgaccatggtgtagaacacagaggcaattttgtcagtgtccatggaatgactggaactgggctgtacatacataaaaatactagttccatagaaaatcgagactgcagtgaagtgggaggtacaggtggacacagccttgtgatgtcctgcagttgactgcatcttcaggatggtgacaaaaatgaatgtgtaggatatccaaataactatgaaggcaaagaatatgtggaagctcactatatagacaagagtcagctcactggcatgtctgtcagaacaagagagaaccatgactgctgggatatcacagaaaaagtgatgtaccacattagattcacagaaagagagccagaatgtgtctccaatgtggatggaggcattcaggaaaccaatgacataagagccaatgatcaaccatgtgcatgcacttgtagtcatggtggtagcatagtgtaagggcttgcatactgctgcatagcgatcataagccattgacgccaagaggtaattttccacagtaataaaggctgcaaaaaagaacatctgagcagcacagtcattgtaggaaatgaccttgtctcctataagaaaaccagccatgacttttggagtgactgctgaagagtaacaaaaatccaccagagacaggttacctagaaaaaagtacatgggagtatggagtcgtgagtccatgagaatcaacaggatcattccaaggttccccacaagagtgattgtgtagatgaagaggaaggtgatgaagaggggaagctgtagacttgggttatcagtgagtcccagcaggaggaagtgtgtcacttcagtcctgttcatcatgttatacaatctctgtggaaaaaaggggggagcaatgtgataaagaaacaaaatggtaatcagaaggtatgaagacaatattcactctgcctttgtaactacaaattttacctcaagattttccaaatgaatgtgcaaacttgaaacccaaattgaaagtaccaattgcattccacagtatcaaatctgaatcatgtatataattttaacaatttgtcaatttgcaaacagacatacagactaatatttgatgtaaatgattagtgtgaatgaatgtattcaacagctcatttcttctaattagagtaaagcctgacacttccatatgcttacctgtcaaaattgctgtagatgctttgattgtgctctcacaataacacctcaaaaatgttactggttacatgtctataaattaataagcataagaaagtgagcaattcattcatactgatataatcctttgttataatcttgcctcagtaaccatgtgaaattttaactcaggctgaataattcctaagtatgtctaaaatagttcaagttaaaataaatttaaacttaaattccaattaactgaactcgtaaatagttttacatgtggctcaaaatacttctaacagtcaatggagataaaatcaagcaaatagaatcctgaagtatgacacaatccctctttaaatgacaaaatgtccaacatttaacttatgaccctcatttgactggtatccttttttctgaactagtgcatggttattattacctgcatatccttgcatatctacaattataaacgaatattaaagatgagtttaacttcaaaatcatgttacatctcaaggaatgaacaaactgtgagagaactggagaattatgagggcaagttcaaccagcagaggcaactctaagtgatgtgtatccccagttatgtgtaggacaaatgcagattctttcaacagctatctgccatttatctcttaacatcatacttccatatgaagagtgaagattataaataatacctactttccattaatattctcagaaaaatatggtagtatgtaaaagaaagtcaactttcaaatgggtagtatgggtcacatatttcacatcattattaggatgggacaatagacaccatgttttgacgaaggtctgtagggagtcaccctagccccgcccaatagtcccggggcaggtaccaggtagatccagggactcgcccagaagggcgtggtgaagaaaagccgtggtgacgtaagggagcttcttaaggggctgcacgtggggacccggagcccttttgttctggccgcgctggctgggttctataacctagctctggcctgtgttttaccttggtgtcttctggaataaagagacattaatcttacacgtggcgcccaacgtggggccgaacccatgaccctgagattaagagtctcatgctctaccgactgagctagccgggcttttttttttttttttttttttttttaagagatcaatgagtgcttcttttttttttttttacttttatttatctattatgtatacagtcttcttcctgcacgccagcaggaggcaccagatctgattcaagatggttgtgagccaccatgtggttgctgggaattgaactcaggacctttggaagaacagtcagtgctcttaaccactgagccatcgctacaaaaggaatgtgccatacggtaaaatttacagctgtctctctaataactctatgtctattcatttcctggtccctattcaactaaatcgagactggatttagagttggatttggctttcctactctaaaatccaagcatgttatttaacaacatttaaaagtttctgtgttatatcaagaagccaattgctataatacagaataaatgaagaataagaggactatctttgtcttttcttggctttttctttcacaccctctcataatcgtggttcgtcaaggtacctttcccggtacacatacataaacaagcgaacatttctctgatgacacttatgtttgagtcccatacagccaacaagacccagcctgacagcaatccctgcatgctccggaaaaggaattggactacacctccccgactgcactggattcaactccctccgtttcgactgacactccaaccagaacctcgagtaacgacttcaatcaagttgaggatttcaacgtagatcttcaatcaaacaaatctcatctaacatggactagacataactcattagagactttccctgtactggcatttttttttccacagggcccccacatgactatcattgtcccatttcagcaggaagtaacctagaagatgctacgcccccgttccccattattgtgtattagggtagtgtaagcctagttaagaatgaccttcttattgtttagagttgggattggaaaaaggtgttcaagttagacaccttttccacatgactttaagacttagctaaaatagacataagatgtaccatagcagattattgtatcttcttgtatttcacccttatgattgttagttttggatattttacactattaagttttaatcctctcttagactaaaaggggaattgtagggagtcaccctagccctgcccaatagtcctggggcaggtaccaggtggatccggggactcgcccagaagggcgtggtgaaggaaagccgtggtgacgtaagggagcttcttaaggggctgcacgtggggacccagggcccttttgttctggccatgctgactgggttctataacctagctctggcctgtgttttaccttggtgtcttctggaataaagagacattaatcttacaaaggtcagtactgctgatgcattgcttcatttgtcatgaatgaagtgttgacatttccctgcccaatttacctttccttagacattggtgtcactgtgtgtctacacctccagcatttatatttcctatgtaatatatacaactgctgcttccataattcaatctaagaaaatgattttgaaaaatttctttcttccatgaaattttcattttcatcttggcaaaagatttactcactcttaatagtcatttttccttggttacattcatacgacagtctaatatagagactgaggtttgaaaaagtcccacattattggctacatttagttctgtttgaaattttttatttatttaaatttttttcattttatataccaccagcagttccccttccctctactcctcccacccccacctttcccccaccaaacccccatctactcctcagttagagaaaggcctctcatggggagtcaaaaaagtctggaatatcaagttgaggcaggaccaagcccctcccctctttaccaaggttatgcaaggtatccctccatagagaatgggttccaaaaggtcagttcatgcactagggataaatcatgatcccacagactgcccaagccataaaactgtaacctacatcctatgcaggttcctcagctatcagtccagagtcagtgagctcccactaggttgggtcagctgtttctgtgggttttcccatcatgatcttgacccctctgctcatataatctctcctccctctctttgactggactctgggagtattaatcagtggtacaaaaacaatgagttcttgacattttagacaaatgaatggaagtagaaaaagaaaacatcctgagtgagggaacacagacccagaaagaaaaacacagtatgtactcaatcaagagtggatattagacatgaagaaaaggaaaaccaggctacagtccataacccctgagaagctaggtaacaacaaggacccttagagatacatttaagagatacatgaatggatgcccctgggaagggaaaatagataagatttcctgagtaaatcatggtgtgtggggagaagaaagggttgatgggaacaggggcggataacatgaggaaataggatggttgagttgggatagggacatagaaggagagaaaggaatgagaaatctcaatagagggaaccattatggatgtagggagaaacctggtcccaggaaaactctcaggaatccgcaaagactaccctagcaataatggaaagggtgcctgaactgacacttaatgcttatgccagttgtgttggcacatcccgtctgtcttctaaaataatgatttgaacatttatagtgtaacaaccatatttaatatttccttatttgaattacagcttttggaggggagagatttcctaactactctgtcttccttattattaaatctgtgggaattttagctcatccacctgacccttaaagatattattttgtgacttttacatatgggatgttgtgggagtgaggtaggtaacataattatttttctctcatcagtaagggaagtgagaatttgaggaaccatgtgaagtattaaaattatagaggtagtatgaacaataatcaggatgattaatttatctggtttggactgtgtgtgtgtgtgtgtgtgtgtgtgtgtgtgtgtgtgtgtgtgtgtgtttcaaacctacagtgaaatgcaatcatacagtgtacaacataatcatttcctcaacaaacaaaatataatttttattacattattaagggacccatgacttgtaaaatgatagaattttgacatatatgctccagtctcacctcagtttacttataagtctttgaaattgtcttttcctaccttcatatcccatagtagagtgaggttccccacactgttaaataaattttacttctcatttcaatatttgtagaatatggcatgccacttggctagaagacaaagaatattcaattcagaaagtaattttgatgtcataaattcagctatattttatttagtattcactatcagacagtcactctcagaaggagtcaaaatattctaacttctcaattcagggaaaaatggtggaaagaatagcaagatggtcaagttttgaatatatcttgtattctttctgtatccttggaagagttacttaccattttattttcaaaagacacatttcttttctctcataattcataaactaagtctgcaaataaaagagaaccacaaaacatcacataaagagataggtttttgaaaaaatacgtattttttcattgatttcatttctcaccatggttgaaacctagcagcaaaccttcatcaggtcaggaaaaggctgttatgtattcacaatgattaccattcagacaaataaaggattccaatggagtatatatagtatacagaacactccttagaaaatacatgatgctgaatcaatttgagtaattcatagaaaactaaaataattacactgagttaaaaatctctagagatttccctccagaggatatgtaacccatgcatccacccatcctacagaagaggcaattaacttgcctatggggatcaagatgactattatctctttaaaaaacatataattattaataagtaaaaccatcataatatatatctgagaacattacaccatgacatatttctacatgtatatagattatctgatatttaaataaggttaaatttatctttcttcaaagatgcattggatctttctgatgaaaattaaaatgtttctcttctctgaaacacattgttcctcaatgttatctatagtcattctgctgtgtaatagcccaccaaaactgctattcacaataaataactgctctccagactttgctgatgctccttcacattattgtccataagctcttgtccccactattcaattctcaatttctatgagatccaacatttcctagtggtgttcatgttgagtttttctgatgtgttcttggattcagtttgacagtattttattgagtacttttacatcaatgttaagaacagagattggtcagtaattttcttttttagttgtgcctttgtgtggattgggtaccaaagtaattgtatcctcataaaaagactttgacaatgaccattctgtttttattgtgtggaacaatttgaggagtattggtattagctcttctttgaatttctggtacaattctgtgctgaagccatgtggacctggacctgttttggttgggagatttttgatgactgcttctatttcattaggggttataggtttatttaaattgcttatctgttcttgatttatatttggaaagtgatatatatttaaaaaactgcccatttcctttagatttttgaattttgaggagtgcagtttttctttaaaaaataagcatttaacttcttttcatgtgagaaatttttaagatgtatttatttattatttatacaggtttctgcctgcatgtatgcctgcaggccagaagagggcaccagatctcattatggatggttgtgagacaccatgtggttgctgggaattgaactcatgacctctggaagagtagctactgctttcaacctctgagccatctctccaacctgaggagcacaggttttcaaagcatgacctaatgattctctgtatgggctactaggagactgggctacagtgtctccctataggcaagtttgcttatttttgttcttgagctttcaggtgtgctgcaaattctctactatgctattatccagtttcttttttaattttatttatttatttatttatttatttatttaatttttggtttttcaagacagggcttctctgtggctttggaggctgtcctggaactacctcttgtagaccaagctggtctcaaactcacagagatccgcctacccctgcccctgcctcctgagtgctgggattaaaggtgtgcaccaccaataccggcttaattaatttaatttaaattataaaaaattatttcacatatcaatccctctccctcctgtcctgccattccctacaccatctcctcaccccacccccatccactcttggagggtgaggctccccccaccatggggtatcatcaaagtctgtcacatcatttggggcaagacctaggccctccctcatgtatctaggctgaggaaatatccctccatagggaataggctctcagttgctcaggtcatctgtttctgtgtttcccaagcatagtcttgacgcctttgcttatcacccctccctctctacaactggattccaggaatttggctcactgctcagctgtgaatccctacttctgcttcaatcagttactggatgaaggctctaggatggcatttaaggtagtcatcaatcccattataggagaagggcacttaaggtagcttctccactattgcttagattcttagttggggtcatccttgtggatttctggagatttccctagtgaagatttctcctaaaccgataatggctccctctattaaagtatctctttctttgctctccttccctgttgcttcccccactcaaccttcctaatccctcatgtcctcccccttactcttcttccctcctttttctcctccctccttccccaccttccccatgctcccaatttactcaggaaatcttgtccttttccccttctttgggagtccatgtatttctctcttaggatccaccctgtatcttagcatctctggtgttatgagttgtaggctggttatcctttgctctatgtctaatatccacttatgagtgagtgtataccatgtttgtctttctgtgttcgagttacctcactcaggatggtttcttctatttccatccatttgcctgtgaatttcaagatattattgtttttcactgctgagtgatactctattgtgtaaatgtaccacattttctttagccattcttcagttgagggtcctttaggttgcatccaggttctggatactataaataatgctgctatgaacatagccaacttgattagagttctaatcacctaataaaatatacttctagagatgcccactagagtatttcagtgtttgatgtattttattacagcagccataagaaaaatgaaagttaagctgggcggtggtggcacatgcctttagtcccagcagtttggaggcagaagcaggcagatctctgggaatttgagaccagcctggtctacaagagctagttccaggacagcatccaaagccacagagaaaccctgtcttaaaaaaaaaaataatggaagtttgctatgggatatgtgctgaaagaatttatcattaaaatttcctatccctgaaattgtctttacttgaactttttcaataccaacgtaatttctatatttgtttcctcttttctgaagttagttttgtcaatatcattatgctctgcaggttgttatgttatagagtcatctgttattctggcctgatattaatatacacaactaatttttgacaaagaagataaaattatacaatgaaaaaatgaaaacatcttcaacaaattttggtagcataactggatactgacatgtagaagattgcagataggttccatatgtatcaccatgcacaaaacttaagtctaagttgaatcaaagatatcaacataaatccagtcacactgagcccctgagaagggaaagtgagcagtgcccttgaatgcattggctggaagctgcatttatccaccccagctctggaaaccttatggatcatcactgagcaggcatttctaccttgtccccagggagtagaatgccagctggcacatttggaccaccaactccaaatatttttcgagacagggtttctctgtggctttggaggctgtcctggaactagttcttgtagaccaggctggtctcaagaccaggctgtagaccgcctgcctctgcctaccgagtgctgggattaaagtcgtgtgccactaccgcccggctactagctagctcttacaacttaaattaacccatttatattaacctgtgttctgccacatggttctttatctcttctctatactgtacatctgatttgctctgaattttgctggtgaataattccttgcttcctcccaaagttcctatttcttcccagaagtcccacctatcttctccttcctagctattggccatttgaatctttattaaaccaataagaaagtgccttagcaaagacacatcacataatgtacaacaaaattattccataagaactatctaaaagaaaccactaagtaacagggagatagatattcaatggggcacctatcctacctaaatgaaacctccattactggaaatgagtttcatctatttgagttgttgaccaaaggagtcccgttggaactgccaagattgttgattgctcttcacaaactggaagtgaggccctattgccaaagacaacacttaaacaattcacaaactgaaagtgaggccctattgccaaagacaacacttaaacaattcaccgaacttagagaagtagaagcaataatagaagtagaaggggaagcaaaaatagagtaagagacagagagggtggaggacatcaagaaaacaaggccttttacctagaaccttcactgatgcagactagtgttcacaatactggaagatactatgaataataccagaggaaaaaggtaaacagcaacccagctgcagaccagtagatctatttgaatgatctgccaacaagatatgctggtgcaatactgggacaaaatgtgtgcaataaacaactgtactgggtggtttgtgtgtcaacttgataccaactagagtcatcagaaataaataacctcagatgaaaaaaatgcctccttgagatacaactataaggcattttctcatttaatgatcaatgaggaatggcccagcccatggtgggtggtgcaatcattgggcttggagtcctaggtttcataagaaggtaggatgcacaagctatgggaagcaaatcagtaaggcactcttctccatggcctctgcatcccctactgccttggggatccttacctgcctaagttcctgtcttgacttcattcagtgatgaacagcagtgctgaaatgtaagccaaataaaaactctttcctccccaacttgctttttggtcatggtgtttcatcacagcaataaaaaccctaggattacagttttaagatccacttaaatgaaacccatacccaacactgcttgcagtgaagaatctgagactggccaggctagaaacctagagaaaactaaattctactgttttctaagaaacatgggatgacaatggctgctaaagatattcttctatactcagatcagtgtcttgcccaaccatcatcagagaataggaacattcttcctacagcaaatgggaacaaacacagtgacccatagccaggcaatacacagacagtgagagaccttggaacactctttcataaccaggatgtattcatcaaatccctttcctcaggctcagggaactctgaagaaggggaagcaaaaatagagtaagagacagagagggtggaggacatcaagaaaacaaggccttttaaacacaagaagactgaacatatatgaactcacagaactgtggcagcatgcacagggactggaatggtttgcatcaggagtcttagagctgagagtagacacaagacttcttccctaaccaagaattatgtccaattgagaactgcttgtaaatgaaaatttaactttatccaaggcaatctcaccagggaaacaaaaaactcttaagagtagtctgcatgcccaatagtagatggctaaagcaaaccaaaatcaatggcatttttggttcaaaatgttgtcaaggcattttttaaccttacaggtccttggcacatgtattattgcttccagttttgtgcttttatgggatttctgtgtgtgcaagtgtgtgtatatagcattctttggctctttttcttatttgtttgttttctccaattttgatttgttcattttattttctttaatccttcttagagaaagaaagaatgtggatctggatattagagtgggtggggaggaggtaggagaagctaagggaaggaaatcaaaatctatggcataacaaaatctattttcaataaaagaaaaaataaaaataaaaatctctgttattggctgggtagtgatgggtgcacacctttaatcccagcacttggcagtcagagacaggtagatctcagtgattttgaggccagcctaatctacaaagtgagttctaggatggccaggactgttaaacagagaaatcctgtctcaaaaataaaaaaaaaaaaaaacaaaaaaagctctgtcatcacatttcctttgatgtccaaattaaattgataattaaggacactcagtaaagaaaagtaaaactattgaaattgattcaattttaagatagtagagatcagttacagccctccattgtgaaagtgacaatgggtacatggtagagaacaggtacagttctccattgtgaaagagacaataagtgaaatttccaaaaaggaaagaatattcaaaaaagtagtcagtagcagtagcagtttgttttgcatatgaaattactgtgatattgactagttgactatgctgtccctgaaaccaaaatgaaaaggaagtactaatatgcttttatgtgacttttataagaaagtctaggtcaggtgaccaatattactagaatcataaaaactagtaataaatgtttctcaatgaaatctgtgtgtatgtttatagactgaagactcatatacactgtccaactttttttctaaaccattgttggaaatcttgcaaggttttttatggtcatttatcaggataatattgaaatagatacaagagataactaaaatttggagataacaccagtcatttctctcaattgagactaattttagaataagaattctattgtggttcaccagttaaatatatgattttatggaggtcgggttttagcttcagacttgtactgggcttgcctcctgatcaacccacctaatcagcaacaaatccaatattatttcataaactctacagtgcatatttggaacagttaacctcagcagatggtatacttaacttgtttacatgaaccttccaaagttattaaaaattgtggtaaaggacaaggaaaagacactagaactgccactgcctgataaacagcaaaccaaaaaaagtataatattactggaagattgtagtaattgtgccactattgagattttaaaagatgaatgggtatgtaacctcactgtgtactatttagttcattctcttggcctctgaaggaaaaacaatggctcttggaatttaacagagaattattaagatgaacttaattagcagttgactcaaattaaagctactatatgagctatggtttcatcattctaatgattgacacacattctggtacttggttcacagctgtattgatagaaaatgattttgttcatccctgacaatgagtgctaaaggaatatatttttatttctcctggaaatgctcccacaatgttatggttggctacagcatcagcttttacacatgggtgattatatcgcaggaacttaatcattctcccatgccccaaattttatacaaaactagtatatcatgacaatttgctaaatgaacttagtgatctagttataaaaacttcagtagacttaatagtaaggcatgtagtggcaggttgcattaaaggtcttctatatcaattaattttctataaatacaatagtgtaagacatggtgacatagatttttaaggatatatggtaaacagttgtatcaggtctttcttacaaaaaaattaataatccttatatgtcctctgaaggttgtggaggcaatacatttttaattttggtttgctctctgaaataatctttcaaatgatcttaaatttgtaattatgagcagaggacagaataacaggtggccctataacagaatattctaaacaacctgcagagcatcattttagataacagaaaaacataaattcctgaatatgtatgtgtgtgtatgcatgtatattcatatatatatatatatatatatatatatatatatatatatattcaaaaaagaggaaacaaatatagaaattcagttagcaatgaaaatgttaaaataaagagaatttcagggataggaacttttaatgataaattcttccaacaaaactttcattattcttatggctgctgcaataaaatagagcaaacatagaatcaccctagtgagcatcactagaagtatatttcaatagggactaaactctagtcaagttgacaatgaagattaactatcatgatacagcagaagaagaatgtgaaaataaataattgagtatattaataatggtaaaaatatttttgaaaaatcaaactcaaaaaatcaaaaatattcttattgatacattatgcttctacatataatgttctttgagtcctagaagaaaatgatatgcaaaggcatgaataaaaagtcagatcttgaacttgtatggttaaaacacaaccaagtaataagaagatctgataagaatgaattttaatcatctatgtcacaaaacattgaatgttataatcataataattatttttccttcagaaccattttcatgaatgctctcttgacctctttgtttctcaggctgtaaactagagggttcagcatgggaatgaccatggtgtagaacacagacacaattttgtcagtgtccattgcatgtttagagctgggctgcaaatacatgaatataattgttccatagaaaatagaaactgcagtgaagtgggaggcacaagtagatatagccttctgatgccctgatcctgagtgcatctttaagattgttatgaaaattataatataggatactaatattattatgagagcaaaaaagatattgaagctagctagacaaataagaactagctcattaacatgtctatcagaacaagaaagtgccatgactgctggcatatcacagaaaaaatgatgaaccacattagacttacagaaggaaagactgaatatatcaccagtgtagactgagacattcaccaagccaaggacatagcaggccataatcagacacatacacatacttgtattcatggagctggcatagtgtaggggcttacacactgctgtataacgatcataggccattgaagccaacaagaaattttccacagtagcaaaggctgcaaaaaagaacatctgagtagcacagtcattgtaagacatgatcttgtctccaattaggagcccagccatgactttgggagtgacagccgaagagtaaccaaaatcaaccagggacaagttaccaaggaagaaatacatgggggtatgtagccgagaatccaagagaatcaacatgatcatccccaagttcccaatcagggtgatgatgtatatgaggaggaaggtaatgaagagggctagctgcaggcctgggtcattggtcagtcccatgagaatgaactgtgtgacttctgtcctgttcttcattattgtcattttacagctgcttggtgttctgtggcaatgagaaagaaaaagaatatggtaataatgaaccttaaatagggaaatatgaacatgggatatagacatccactgtactaacaacttgtttggaaagattttctaccaaagcctgggctttgaatgccaatttaatgtgtttgctacatacatgtcacatgctactaacccatagagactatggcaccatgcaaaagttccagccagaagggtcaccaacatggagagggaaagtggacacaggctctgtcttgtaaccaagaacctatctataaatgacacacactggaaaagataaactcacttttctccaatgtagtctcactggatatatcaaccacactctagagcaggacacgcacaggagtagtttgtctatacaaaatgaactccatggatttcatgaaatttttatttggggatttttcttaatttttttgtttcattgcttttcatttgattttctttttttagaactttggcataatattttatttttattttgttttgttgtatatatatttatttttataatggtaattagacccaattttaaattagaagcaagcttctttttatatgttcatcccagttccctctcccttattttgtgaggttttatgattgtaagaaagaggtagatagatagatagatagatagatagatagatagatagatagatagccagagacagacagacatatgatagaaagatatatgatagatatataatagaaagatataagatagatagatagatagatagatagatagatagatagatagatgatataaagttggttgggtagggagtatctagaagtagttatgggaggggaaaacatgatcaaaatatgttggataaaaatttttaaataaaaagaaaatcttttgcccttacactaattaattcttaaacaaattactgaataaacaacaaataaataagtatttgggttcacttctaaactcagtaaaagtttgacactttcatatttgtcacctgccaacaactgaattaaatagttagattgcatttattgtgtcctctcaatgatatgaattcagagaaatcacaagacacagtctttgttgattcattcagggctattttatcacttaaataggaacattccctttttttcattatttatatgctttatgttgtctgtttattttattaactcctatgacagatgaacatattgtaaatatgaaagatgaacatattcaaaatataaaacataaactaatctgtgtcgttcatcccagttttttaaatctcatctttgcatatcacatgagggcaatcagtaaactgcctatagtgaaatgtgtgtacatataactcctttagaacttagtttttggactctcctgaaaaatatattttcactttttcaatagttacagtggaaacatctgtctgtggattgacatgaattacaattcttattagatattcacccttaccagatatcttgagaagaaaagtttattcacatagatcagtcagtctaatataaagtcagcaatgaaatgtaccctaaatgtgattataagcacctattttcctagttgtacaatgtattctcagttctctgcaccaaagatagaagaatgagcgttaacatggatcattgttgaaattaaccatgatctctttctctttataatgtcattattatgtcacatctacaacagattttgcaaattctagctataaggctgaacaagagatatcagtgagaatctgaagacaaaattaacaatttagaagtatatgaatctaatatttatcttttgatactttttctcaccatggttgagacttctggctaatcctctggtcagaaggctttatagttatctattagcactgaaaataaaacattgatcaatgaagcatggtatgaagttcattccttcaaaattgcaatatggagttgtatttgtgtttcatagtctcacacatgccaatctgaagcaaattatacagacctggaaagtgctggagacttcccccaagaggctacctatagtttctgtccttatattatgtggaaaaagcaattaaatgacccaagggaatcacattggttactttaatatgcatacatcattttgcattacttttattagttggttttgaaatttaaaaatagtaattattctttttattttactttcttttcaggacattctataatacgcttctaaatatcataggaaatagttttaatgtatgttctattttgcttagttttatttttatgaaaataatttcttctcttatatagtacattttgagtaaggtttttctgtattttatatatatttttctgtatttatatgcaaagtaatgagctcttaatcatggaatttatacctttgttcttgttggtcaacttccattactgaataaccttataccgcttcatgctggtaccattccttcctccaacaatgctccttcctcagaaaatagttttcttctttaacacctgcatgtatgccatcaaacttcaatcctgggattgaacttttaccaacaagagatagattcacacctttaattacacatgattatacaaaattttcaattatttcccataatgaaacttgtaaaggaaataaacctctctcccatccaaaatatatacaagccaaaaaatataaacatagagaagaacacacacacacacacacacacacacacacacacacacacacacacacaccacgtgcaactacacaacccctatgtctgtaatactggaatgacagcaattgatataaccaagaaattagcattcacataaggtatgactcagtaggtgaatagcaacaaaatttccaataaactcaaaacaaactatgaaaaatgtacatgattaatgagacaacaaaaggaaatgagcaatatatagcttgtaagtgcttcagcttaaaaaagtcattgaaattattcctaattatattctgctatactcaaagatcagtgcttagccctattaccatcagagaggcttcctctagcagctgataggaacaaacagaaacccacagcaaacattaagtggagctcagtgaaccccatggaagaggggtaggaatgattataggaaccagaaggggtccaggaaaccaagagaatcaactaagcagggctcttaggggctcacagaaactgaagtgacaagttcagagcctgggtgggtcttcactaggtcctctagatgtatgttgtggttgttcagcttgggtttttttgtgggattcctaataatgggagtggggatatctctgactctttcgcttgcctttgggacccctttcctcctattagcttgcctaatccagccttgaatagggtttgtgcctagtctttttgcatgttggtatgcctcattcagttgatatgcctagccaaagcatgctcatttaggaaacatttaaactaggaatctttaataagagaacttggatattcacataagtataaaaggctcatatgtaatcagttgttatgcaatcactatgaagaacccttcttccaatggaaaagagtcacagtatagcattgcttctgagggctgtgtgatattcttcatcacagcatgttattttgcatttgccaaataattgtataagctactattttcagtagggaccagagtacagaaggccataacatagaacccagatgccatgaatggatctctgccacctaagccatatgtcacatcaggttgaatgattcttgaatttttaacagcataatgaaaggctgtttatcttatttgattgtatatttatttttgttttattgtctcattatattttagtttttatacacagagaagttgtaaacaggcagtatctatggtagtttgaaagaaaatgccccctcccatggcactattaagagatgaggccttgttataggaagggtggcactgtgagggcagcctttgaggtctcttttgctcaagctcccatcagtgtgagagtcagcttacttcctgatgcctgcaacatgtagcaaccttacctccagtaccatatcttcctgcccactgccatgatccccatcataatgataatggactgaacctcacaaactctaagtgagcctctccaattaaatgttttcatttaaagagttgccatgatcatgttgtctcttcacaataataaaaacccaaactaagacagatgttggtaccagaaactgggctattgctgtaataggcctgatcatgcgtttggaagaatttagactttggtactttgggtttggaaagtggtagaatgctttcggcactgtttaatgggccaaactagtcataacatggaaaatggtggttctaagaggtatttgaaccaggaggggggtgcactcacacaagaggtttcagggaagaagaatattagtatgttgcctagaggttgttcttatcatattctggtgaaaaaaaaattattgcctttcacacttgtctcaagagtctgcctgaggctaaaatgaagagttttggattaatttcattggcagaagaaatcccaaaagcctagcatagactttgttgtatgaatattagtggtggtaactctaatgaatattcatgatggaagaagcaactgatcctctagagtaaattacaaaatttaaattttgaagagaataaaagcaccaggaagtggaatgaagctaaatcctatgttcaaggatataaacagattatgaaatggaatacagggaatgatgacttcagggcaagatcctacccagctaaatttccaatttgtggaaagaaactaaagcttagagttggatgtggtagggcacacctttaattctaacactgagaacacagagactggcagatttctgaggacagtctggtctgccgagtaagtttcaggatagccaagcttaagcagtaagagaaattattgaaaacagaaagctgaagatatgattgaacaaggggatcatgttccagcccaagcaaggtgcaaaacttgacagctttggccacatggttctggcttcagagttaaggattgaagaaaagagtcatggaataagcccactgagtcaagtcgtttgtcaggagtgttcctaaatggaagactagtagagagatcattgtgtgaagcagtgaagttgaaaccaggatttccttagagaacccaaggtgttacagatgccatagtcatgggatacatgctgaggagactgctaacagagagggaaccaaccccctcaaaagaagtgtgttccagtcaacaagcttaacagagttggacatctgaaagcattcaacatcagacatggagctatagaatttggagtttgtccagttggttctcatacttgtttttgtccaatatttccttgctgtgctcccttccctctatgttggaaaagtaatgtatattctgtgccactatatgttagaaagatgtaatctgcttttttattttgattttaacacggggaattttgattacaattaagattgctatccacctcagaagagactttggactttgaaacaagtttgagattattactgacaatggagacttttgaagtttgactgaatgcattttttgatctatgatatggctataagcttttggtggacagggagtgaaatgaagtggattggaagaaaatggctcccaacaggagtagcaaagttaggtggtgatgccttggtggcagaagaacatcttgtctcttcacagcgattaaaaacccaaactaagacaatgcctaacaatagaggaaaaaacacataaagtaaaagggaaaagtaggtgtagggtaatagatgaagattgaaccaccccttgctctattgctaagagaataactagagataaaatgataagaaacaggagatgtgaatgatatcgtgtttgttttagtgttcaggtgacctcactcagtattatttcttctagttctatcatccatttgcctgtaaatttcaagacttcattgttttgtttgttttaccccactgagtagtactctattgtgtaaatgtaccacatattttctattcattctttggttgaggagcatctaggttgcttccagggtctgactattacaaataacactgctataaacatgattgaacagatgtccttgttgtatgaatgtgcttctttgggtactaccaaagagtggaattgctagatcatgtggtagatatttttcagcccctttattgtctacatataggagggctactgattttttctttagttaatcttgtattctaccactttactgaaggtgtttattagctataggagttccctggtaggattttggggtcatttatgtaaattataatatcatgtgcaaatagtgaaagtttgactttttcctttccagtcgatctccatttattgtcctattgctctagctagaaattaaaatacaatatggaagagacatggagagagtcgacagccttgtcttgttcctgattttagaggaatcatgttgagtttctctccatttcatttgatgttggctgttggtttactgtatttttcctttattatgtttaggtatgtttctgttatccctgacctctccaagaccttttattatgaaggggtgttggattttgtcataaactttttcagcatctagtgagatgatcatgtggtttttctttttcagtttgttcatataatggattatagtgacaaattttcatatgttgaaacatacctgcatctctgcctacttgatcatggtggatgatttttctgatgtgttcttggattttatttgccagtattttattgagtatttttgcatcactcttcatgagggagattggtctatagttcccttactcagttgtgtcttgtgtggtttgggtaacaaagtaattgtagcctcataaaagagtttgacaatgacctttctgtttatattgtgtggaacactttgaggagtattggtattagctctttgaatttctggcagaattctgcactgaaatcatctgaccatgtacattttttggttgggagactttttgatgacggtttctatttcattaggggttatagatctatttaaattgcttatctgttcttgatttaatttggtaagtgatacctatccataaaattgtctatttcttttacattttccaattttgtgaaatatacattttaaaagtatgacctgatggttctctagatttcctcagcatctattgttatgtccttttcatttctgattttgttaatttacatattctctctgccattgggttagtttggataaatgttcacctatcttgttgattttcacaaattgtaagtgactttgtattgttttctttgtttctactttattgatttcagccctcactttggttatttgctggcatctactcctcctggattagtttgcttctttttgttctagaggtttcaggtgtactgttaagtctctagtgtgactattctccaattccacatgtgggcacttagtgctatgaactttcctattagcactgctttcaaagtgttccataagtttgggtatgctgtgccttcaatttcatttaattttaggaagcctttaacttctttatttgttccttgacctaggagtgatgtatttgagcattgttcaatttccatgagtttataggctgtctgcaatttgtgttgctgttgaattctaactttaaaccatggtgatccaataagatacagggggttattctaggttttcagagattttttgtttttgttttgttttgttttctatctttgttgaggtttgcattgttgccaagtatgtggtcaattttggtggaggttccatgtggtactaagaagaaggtatattcttttgtgttttgacagagtgttctatagatgtctgttaatcccaattgattataacttctgttagtttctgtatttctttgttatgtttctttctgttagtcctgtccagtgttgagagtggggtgtcaaagtttcccactacaagtgcatcagggtttatgtgtaatttaaattttagtaatgccagatggtttggggctgcaaacaagtctctgggaatttgttgggtggaatgaggctaagtgactttgtcaagggcctccagtgggggtgggggacaggatatggccatacctctcctagtgcagttggaaccaaggctccgatggtggcagatgcagcactggatggttttgaatgtccccaagtctctggggattatgtggtgggatggagtgatgtgctctggtcaagggattacaacagcaggctcactttattcttttataacactatattctatttcttttccttaggtgatctcctccccccactctggttatttaccagctttctatcccctgtggttgaaataaatgaaacacacttatctaaagcttaaaggttatattctatagaacaagtaatgcttgtctcatgaatctgggttacaccactcaggatgactgttttaacttcatttgattacctgcaaatgttatttttcttaacagttgaataatattctattatattaatgaaccacattttcattgcccattcattggcctatggatatctaaaatggttccattttctagaaattgtgtatgacatcagtgactattgctatacaagtatccatgtactaagatgtggagtcctttggacatatgcccaagagagggatggctggatcttggggtagatcttttctcagcatttttaagaataatgatcataccagcttgcattcccacgaccaatgaataagtgtttctttttccatgcattgttgccagaataccctgttatttgtttcattcttgaccattctgctagatgtaaaattaaatctcaaagtagtttaaattttcattatcctgatggcaaagatgttgaacacgtctttaagtatttctcagtcattagtgtttcatcttttgagaactctctgtttagttctataccccattttttaagtaagactggaagaattttgatgctaagtctttgatgttctcattgtttttatattcttgttagtaaccatttgtcagatatataattggtgaagatttttttttcattctgtagtctgccacttttctagaattctgctgccatttgctgtacagaaacttttcaccttcataaggtatcacttattggttgtaggtcttaatgtttgcactattggtgcccatacctattttaacttctatcagatccagggtatctggtattatgttaagagctttggtctatttggatttcagttttgtgcagggtagtagataaggatttaatattgttgttcaacattcagctaggcagctagccaaattgaccacatttttgttctaaagtataagacttgtttttaataatatgtttcaatcttcaaaaacaatattttatctctgattttatctcctaaaagtgtcaatatgaatgaactggttgtgcaaatgactaaaaattgagtataaatttctattagatctacatattgcatatattcatatatgtagtcaaaatagtcagttcagaactacaacatattacactcaccagtattttctcaaattaaggccgagtggaaatgaacttcttcttcttcttcttcttcttcttcttcttcttcttcttcttcttcttcttcttcttcttcttcttttttttttggtttttcgagacagggtttccctgcggctttggaggctgtcctggaactagctcttgtagaccaggctggtctcgaactcacagagatccacctgcctctgcctcccaagtgctgggattaaaggcgtgtgccaccactgcctggcggaaatgaattttttaaacttacagaatttatattttaatacatctactaaaactagatcaagattcttaacatgtttattaacattctctagtaaacaaatccacaggacaagtatagagcaatgtgatatttgttataggatatgcgagaataagtatggatcctaagcagtgtcgtgaaatgctatctgaaagctgtgtaacaggaaggattatgatacaatttattctgattttaaagatgtggtgttaacagtcaggggttgggagtaggcaactagtgactcatatgaaactggaggagtgaaaaacagaagatccaataactctgatgtttgaaagtgagtatacatagattttttaatttaaaaattgtgttctttatataatgtagtgttctatttctgcaaccctcagtggtttgagtatatcttcaaggaaatagtaattctattgagtcaggtaatagtctatctgcatagactacccatagtcagacacactcaatacacacaatacaatacaacagtaactataaaaccttgttctgaccaatgcaggttttctttttgtatggttaacacatgaacacacacacacacacacacacacacacacacacacacacacacacacacaccattccattctgtttaattttccaaatgtattttcatgaatcctcactcagcatctttaaacatttctcttactcatggatttcttcatttttgccatacatttatttttattgttaagtctgtcacttacctttcctgttgctgtgatgaggtacacaacaaaagcaattttaaaaaacagaagtgtgtattttggctcaaggcttacaaagaatatatatgttccatgaggttaaagaaggcatggtagctggagtttaaagctgctggatgcatgtttctgtgcagtcaggagtgtcagaaatagttcctggtccttagtcctctttttcctttttaatcatcagaggtgctcagtctatggaatggtcatactcactggagagggtgggtattctctacagttgaactttcaggaatcacctttatggcattactcagaaaagtattcacaaacatactagatccagtcttgttggcaatgaggattaatcatcatgatatgttatagtaaatgttcagggaaaatgattaaatgtatcagtatcagtaatgacatttttgacgaaacagaatcaaatatatcaaaagcattttcattcaggccatgcttttaaacataatgttcctttttctgagtaaaaagtagagggaggggtcacctctcaggcacttcaaaaagcattggttaaccctggacatggaggtaattagataataatgattctaataagtgtgtataagaaaagattaaggtatatagagaaaatttatttttctagatgaacaatttttctaaatgtccctttgacttccttgttcctcagactgtagaccagggggttcaacatagggatgaccatagtataaaacacagacacaattttgtcagtgtccattgcatgactggaacttggctgtaagtacatgaagataagagtcacatagaaaatagtgacagcagtgaagtgagaggcacaggtggatatagctttctggtatcctgagtgcatttttagaatggcaataaaaattagcatgtaggacactaagataattatgagagcacaaaagatattgaagctggctagacaaaccgaaaccagctcattcacacgtctatcagaacaagagagagacatgatggcaggcatatcacagaaaaaatgatggatcacattgtatttacagaaggagagactgaatgtatccccaatgaagacaaatgcattcatgaaaccaaagacataacagcttatgatcagacacacacagacatttgtagtcatagtagtggcatagtgtaggggcttacatactgcagcatagcgatcataagccattgaggccaacaagaaattttccacagtagcaaaacctgcaaagaagaacatctgaacagcacagttgttgtaggaaattaccttgtctcctaatagaagcccagccatgactttgggaatgatagctgaagagtaaccaagatcaacaagggaaagattacccaagaaaaagtacatgggagtgtggagccgagagtccaagagaatcagcaggatcatccccagatttccagccagggtgatggtgtagatgatgaggaaggtgatgaagaggggaagctgcaggcctggatcatcagtgagtcccatgaggatgaaatgtgttacttctgtcctgttttccatcattgtcttcttacagcactagatgttctgtgataataaaaataggaataaaatcataacaattacaaatttgcaaattactgacacaagatatagacatgcattttaagagccatatgatccaaaagatactctacaaaagactaggaattttatcccaattcactgtgttaattatgtacacagtcagatgctgttgactctgaaaagtgctaatgaatcatgtaacttacagccttatctatatgttaactaagtcttaaacagttaaataatttgcccaaaaactactgtgtaaattaatttatcttgctgttcacttgtgaactcagtgaaggttgtcacctccactcagtaaatttttaatgatttgccccccaaaatactatgtaaattaatttatcttgctgtctatttgtaaactcagtaatgttgttattttcacaatattcatttgccgtgatatgataaaacacactctcacccatttattcaattagtacaatttatcatacaaacaagaaccattttcttttcttcattctttgtatggtttatacttacttgtttacttcctaacatcctcctctgattgtaaaaatatagtgataatataacgtttatcattttttctttgtacctctgcagaaataagtataatgtaaatgacaatcaagaaattctctatattggcagattttatttttatacttcaatttgatattagttgtttagaaaaaggttgaaatcaattttaacctttaagtaatccatactcaatataactccccatgcctttgtatgaattactcttctagctaaaatgcttattccagcttgtcatttattgtggataaaaacagattaatagtcagtatgcaacccttaagttagacatggagtgttgcctagatatgattataggtatactctctcaaattgtactcaaaagatctcaaattcactaaactgggaaaaacggaagaatctatattagaatggactagtttacaagttggttatacaggtattcttcaaagataggttgctcacctcatctcttttagcataaaaaaccacaatatcatttctgccccaattttacaagttctagctgtaaaacctggatatgatgtgctggaggactggctgagagattaaaagagaacactgctcttgcagagaatctgaactctggtcccagcacccacattggatagcttgtgtccagctccagggagaaagatccttttattctagccctgggacactggcaatcatgcataaacactcagagacacaaatacacagacatttaattaaaatcaacgaattgagacatttgtgcaaatcatgattttagattaactattttaaaaaagtgagcaatctaatacgccttaccatggttgagcattacaactatcccacatgtcagaaggccatttatactaagaaccattatcactgaaatgaaaagtagagaccaaaaagatatgacctgaagattgtttcctataaaatgatgagatgtagagtcctattagatctcagagactaatgcttggagacctggaatgaatcatacagacttgggagctctggggatttcttcccaggaggttgtgtgatgcttctgactctgcatggtgaacaggaagcaattaaacaacctgtgggatcaggttggctacttcagtgtataccaatgtgtttgcattacttgttacttcttgtttttcaaaatagttaattaatgctctgtgaggtgcagaaattttagtgtaaagtgttgtaatttttttttgaaaagtggtgcaagaaagatgccatgtaacagagtaagctgagggttttttttttaattaagaaaaggggacagggaagaccaacttctgggaacgggagcaaaaaaagaaaggcagagagggtggagagagagagagagagagagagagagagagagagagagagagagagagagagagagagagagagagagagatggtggttagggccattttaaaagggaatgtagtgaataggcacaggtggttctcttagcagcagcagctaagggtatatcctgtcatgaccccaaaggagcaggtcagtacaaatacctaaatagtagtatatagtcctaagaatgatgtcaaatatctagccctatttccaatacataatcaagtaaggcaaatcatctgaaattttctttgataactcttccttccacctacaacccatcttgtgaattaaattatccaactgatttcatttttgctgtaactccctaaccatacccctgaagtatatgtcttttgagtctgtgtttcacttagcaattaagtgccatctgcaatgccatttgtgacagggatacagggatatttttgggttttttttgtctcgatcgtgtgtgtgtgtgtgtgtgtgtgtgtgtgtgttaaaatgtctgtgtacatgtatgcaaattgcattgagtgagtatatacatgttcttgcttttttctctgttgctgtgataaattattgactaaaaacaacatggagaaggaaggttttatttgacttacgtttctatgtcacaatacaccactgagagaagccaaaccaaaaacctggatgcacaaacagaaacagcatccatggaagaagttgttactggtttggtccttctggctttctcgccaccttgcttatgttttccaaatccaactgcctagggtgtcaccacacacaatggatagtacccttctatgtcaattagcaatcaagaaaacaccgcacagacatactcatgggtgaatctgatggagacagttcctcaattgagtttccctcttcccaggcatgaattggtgaacatgtttgtgttcattcacgtgtgtgtatgtgtgtgtgtgtgtgtgtgtgcgcgcgtgcgtgcgtgcgtgcgtgcgtgcgtgtgtgagagggagaaagagagagagagagagagagagagagagagagagagagagagagagagagaactagtggatgatgtcaggacatgtctgtgagtgctctccatcttagtatttgaggaagagtccctcaactgaacttaatgctgaccaataaccatggtctagttagtcaacttactcagtagatcctttgtctttgtttcagattgctggaatcataggcaggttgccatgaccaccttgtcatttatgtgtgatatagagatctgaactctggtcttcatgtatgttacttatatggaaagcccttttgccactgagccatctctccatcctgtagaatcattttcaagcaagaggaatgtgccagtatatgaatattgcatattactttttctggtttgcaacagaacatttgtgctgatgcaaacatttggttattaggaataaggaaaacttaaatagctgataaagtaatcttagcagagttttgcatttattaatgtttaaatatttgagaatttcatgtatgtacacaatatattttagccaaatctatcccccattccttcatttccatatattcccatatccccacaatgtctttctcaaaactccatgcattaattttaaaacctacttaatcaacttagttctggttcaagatataaaacaaagcagatttgcagaatatacatattgtttcagtagtgacatgatccctaattgcattctaaatacttgtctttatacccacagatcagtgtaatcatgtcccatcatggaaaattctctttgccaaaaaaagagagcactacagaaaactacaagcaatcaaaatgtatggttgtggatcccagtcacaatggatacatatacaatacaattctcatactcacagctcaaatatcattgcaaaagagggaataaaaatattataagagccagtggattagctaattaattgtgaggttgtatcttctgagaatgtcagaagctacactcataaaggttcatcaactttattatgcaaacatgagctgagcaagaataacatcaatagataggctaatgtggattgagaaaagcccatgaagcctcagctctacacaaagaaactacaatcagcagcggctaaggaattctgagtgcaggaccttccccaggaagcacttaccaattagttacccaatacaaaatagtgaaccttgaaacattcgtaaaaataatatcatacagagtagttgtaattatgcactcatacacacagacactcagatgcacacacatacacacacacacacacacacacacacacacacacacacacacacatatatattatatatatatatatatatatatatatatataaaaggaggacatgaatttcaaaaagaacaagaaatagtatatgggacggtttagagagaggaaatcaaaagggaaatataattatattataatctcaaaactaaaaataagtataaaaccaatcatcatgtttctatcagcagcctagaaaccctgccacattattattaggcatcatgagtcaatgaattattattcacaattcacagatatgaaaattaattgtattggcatttaatgacatgtgaaggctaaggaaagtaacagataagatctaaaacaatgtccctttaaaggaaaatcttagctctctgtcatgaataaattctattttagactttttacatctaatgtaaaatgagtataagaaggtagctcctctgactaactgattgtttgagttttaaatttattgcctaaagcccatatggatagctgaaaactatgtatgtgagaagcaaatctaaatgccagctaatgtgactttatgaaaataatctgcacttctgaatttcagagacaagaattgaatctacagtggttgatatagttttaaaacccatgaaaagaatcattggtgttaaaaagaaacagggcttttgataaagcccatagggcacacatatgctgctggctcctccattctctccaaaggcactaatcctctctctgtggttcaccaggcattggggtcatttccagacctacacagctgatttgatacatgacacttaccccttgagctcaagaggattcatggattgggctatctacagcaatgaatactatttgatatttttattttcattaccaagcagaaatcattgttttctcatttcagaactacacgatatggttgataagtgttcaagagtgtacacttcagcccatcaattgttagtttctaaagtgcatcacccactccaaaagagtctttactagaataatttgaataatcaggatttctcattctaataataggttgtgtccaaatttatatggattttatttcatgttataatcttaaagaaacataagatgaggttcatctggagttcgggcttaagataatattgcagaccatgatggctgagaagacgtgatggcaggaaatgaaataacagtgtatctacagttaggagcaatacaaattaattctgggacccacctaaatcctacttttacttgtgctaaaataacaggcaattggattgtaacacccacagtcagagtgatgatcttctttcagctgaaactttctagaaataacctcatagatatactgaggtgtgtttccatggtgtatctaaatccagaccagttgtcaatgtaatggtacaaaaagtacaaaataaagtaatcagacagaaatattggtaatgttttttaaagaaaaataggcaaagataaccaaagcattctcttttaaatgctacatttttaacatgatgttttcttttcccagaaaaaaaaagaacccactgctgcagaggacagggtaacctcaggaacaaaaaaatgcaagcagtgcattaaataactcaatgagtatgattctaattctgtgtgtcccacacaggtatgacaataaaaaatagtattcttccttcataataatcttcacaaatgtgattttggccttgtttctcagattatatgtctgaagtttcagcatgcagatgaacacaaacattattcagtaaatgcccattttatgacttcagctgggtttcaaatacatgaagattacagtactataggaaatgcagacatcagtgaagtcggagacacaggtggatgcagcctccaatattctgaacatcaggcatcctcggaattgtgatgaaaatgatactgtagacattaaggtaattataaggtggggaaagtgatttaacctggtttcccatacagttcctttacatatctatcaaaaaagagagtcaagattgttggtatatcacagagaaactataattagcattggactttctgaaggagaggttgaatgtgcattacctctaacatgatatcaaatggaatcatacttgttcaaagtctttgtattgagatagtgagctgattacacagctggagcacgctctggagatttccctcctgagacaaattataacttctaagtctatattggggataagatacttgtaagtaacatatagggatcaagttagctattttaatgtaacacaaaaaatgaaagacccagagacagatactggggttcaaggttcaagctgaagattagaaaagcaaagcagtgggccactagctcttaccaggacctcaggctgaatgggttgattctgctgcctctcctcagtgtggctgtagaatcctaagattgaatggctttctagctcagtgtgactgaagaatgaatccatcctatccacaatgtggctggagaatgaatgctcaatactgactatgcaagaccctggtcctatcttttatacacctctagagttaggactaaagatgtgtggtcccaggagctgagatatttgtgtgagatgtttctctttaggactggatcaaacttgtgtagatctgggtgaccttggattcacagagatctgtctacctttaatcctgagtcctgggatcaaaggtgtgtatcaccactgcctgatctctatagcttgaagctgtctttgctttctgaatcctcaggcaagctttagtaaaacataaataatatatcaccacaattccctgcaactaatataaggaaaactatatacaataagtatacacaatatataaaggcaataagttcatcagctagtgaccaggtactttgcttttctgatcttcagcttcaggtttgaaccccaatatctgtttctggatcttttattttttcatgttacatattggtacccaacattaaagtaggaattcatgaaaaaaatcactttgagctcagcccaaatctgaactgctggcaggatttctgtctgagtccctgcccatccaggtaggtattgtttttggttttctcctaaaatctttgagcaagtatgggatttttcagttatagcttttctaaacagtcttcagctgccaccaaaactcaggaggcctttgggcttttcctacagtccttctcctggagctcaaactctgagctcagggcgacatgttagttctctgattcagatctgctaagcctcacagttcactgacactgttggcatatttggtaaatttactgggaattcttaaaggaaaggattagtttaaaaagagagtttttacacacactaaaaaatggaaaacactattaaaatggataaaattagatctgaatatgattaaacaaaagatagttttaaaatggaacatgaagggataatcaaccaggaaaggcatactgttaattggtttttgttttgttgttgttgttgtctgtatatcagtatttattatgttttcttctatgagaataaactttgtggtagaacaaaaaattcaaaacagtattatttataaattgtgaacaaatggtagtggatagccttaaccatcaaattggttgaaatcaattgtacctcatttacagtcacatctacaaaatgcatatacacctgaacaatgacattatagagataaagacatgaaaataacccatttgatataattgttggttacaaatttctccttggaaacagtttcatttctcttttaaaaaacttttttctctttttcttaatttaaattagaaacaatcttgttttacatatcaatccaagttccctctcgctcccatcctcccatgcctcccaccgaccccccccttccaatcccgaatccacgccccagggggtgaggccttccatcagggatcatcaaagtctgtcacatcatttggagccggacctggggcctcctccatgtgtctaggctaagagagtatctctctatgtggaatgggctcccaaagtccattcctacactagggacaaatgctgatctattaccagaggccccgtagactgcccagacctcctatctgacacccacgttcagggggcctggttcagttctatgctggtttccctgctatcagtctgggatccatgagctcccccttgttcaggtcagctgtttctatgggtttccccagcctcatcttgtttattgttattttgataatctttgttgttcttttgataattcttggtttatctctaaaaaacttggttgatatgagtgctaagatataggccttagaaaaacttattaaagcagattatagagaccgagaaattacatggaaattatgtggaaaaccaaattcagcattgcatcttcaggtaaaatatgaacaacctaaggtcttaagagaaccaccattaatatatccagaaaccttacaggaagtgccaaatgaaggaggttctataagagctacttggaagctttgaaagggaggaaggtaggccagttgggggaagatgaaaggaaacttttttcttttctacaatttatttcaattcatttgagacctcaatggaatgaattatggccactcatctaaatgataattgtttcaacttactttatcaatattggactttgggggggttaccctcacagaaaagcatcatgctgtctatctgtacatccagtaatacattcaaatcaacacacaaaataacctctacagtagccatattatatttaactccaacaaattcagcatatccagtgtgtctcttatcatgggagaactgtgtaaatttgctcagttcatggacttctttgagtatttgttatattcacattttcattgacatgtaacaaatataccaacaaaatgagacaatacatcaatgttaaagaagggtttaggggtcttgacctccagaaatgttagctattctaattcagatatgtattgctaggtatatcatgtcctgttttaccagacattagccattacatatacaaacaaatcaccttgaaaacttcagagtgaacttgaaatataactcaatacatacacaagatctgagaggaataagcccatatttgggcatcccaaatagtgtagaaatgaaaaactcctaatgattattttctcttcaaaaagtgaatgtgctctttagctttaataatgcactcttgacctccttgttcctcagactgtacaccataggattcagcatgggaataaccatggtgtagaacacagatgcaattttgtctgtgtccatggaatgattagagctgggctgtaaatacatgaagatgacagtcccatagaaaatagagactgcagtgaaatgggaggcacaggttgatacagcctttcgatatcctgcagctgtgtgcatttgtaggatggaaataaaaatgagtatataagatatccagatgactattatagcaaaaaagatattgaagctcactacataaacaagaagcagctcattgatatgcctatcagagcaagaaagaaccataaccgcaggaatatcacaaaaaaaatgatggactacattggagtcacagaaggagagactgaatgcatctccagtgtagatggaagcatttaggaaacctaggacataacagcctatgatcaaccatgcacacacacttgtagtcatggttgtggaatagtgtagaggcttacacactgctgcatagcgatcatatgccattgaggctaataggtagttttccacactggcaaaggcagtgaaacagaacatctgtgtagcacagtcattgtatgacatgattttgtttcctataagaagtccagccatcactgttggggtaacagctgaagaataacaaaaatccaccagagagagattacctaggaaaaagtacattggagtgtgaagcccagagtccaggaaaattaacaggataatccccaggttccccaccacggtgatggtgtagatgagaaggaaggtgacaaaaaggggaagctgcagatttgtgtcattggtgagtcccagcagcaggaagtgtgacacttctgtccggttctccatccacattatttgagatcactggaagctctatgaccataagaataagagggatcaataaaaatgatataaaaactgttaattatgtctagaaaccatggatatatgacttgtgccttgaacttcttcaaagaaagaccgggcttcagaatcaagttgagtgcactaattatatggtgttatttattctatgaagtgaggaatcctaatagattatttcttttttttctttttttctttttttggttattagagacagggtttctctgtattgctttggagcctatccaaaaacttgctctgtagacccggctggccttgaactcagagatcctcctgcctctgcctcccgagtgctgggattaaaggcgtgtgcactttataaatgggatgttgacaatttaataatataatgtaaattatttgtttggtggaaacttttaccaagtaatctcccttgaactcagaccagttgatatttccatattgttcatctgtctaacaactgttgtgaacatttttgaagtgtttcttcctatgaacatataagttttatcagttgccacttttatgtaaattgtaatgtgcaagaagttgagtgatttactcttgttactaaactattaattggcactctgtgctttgaactcatgacaacctttaaatgactctatgtcagttaattctcagtttgaagagaatttaaatcaaatccaatcacctgaattcataattaatcttttgtcaccattcaataaaaaatcagtatttcaccctgaactaataaggtaatgatcaagtaataatttcatgtttttcaccatatagtttcctctcattgcaaataaaaagaacaaaaatcccagtaaaaaggatccttctcttaaaagcaaaagtggtcttcatgaaattaaaatttctcaattagacaagactggaatacaccaaatatggtctcataacaaaagtcaaacaaacttgcataaagaagttcttaaatttttgatgatgtctcatcttcaccatctcagacaagttttcacatcaccaacgtctgtacatgttggaaagtcatcgctaaatcataaacttttaaattgattgaggaatttagctcttgtacacagcagttttggagggatagttgttatagaaatgagtccaacctgaaaatacaatttgcctagtgagtgaatcaagtgatttggcagagaattttcatcattgaaaaagatctatattggagcaattgcttaccaggtaggagtcactgtagccttattccccagaacattgtttctccaaccacagaataacgaaactcgcaaaacccaagatgaattcagcaaataaagcgcgtaagagaggggtatactgggtgttgagcacagcctgacaactgccatcatgctagtattaggctgggtcaaggaacttcacatttgttagatcaagatgaatactgaagttcaaggcttcacttgcatgtcagttttgaagtcttgaagcttccatctccatttttttttctttttctcccacattccagagagtgatcatttctatacttgctagggtttctctgtctttactcaaagaataacattgcctttctacatttttgtgcagactactgtcaattattctttgaagtctgtatttcagtttggtaaaatcccggctatttacaatccattctttgtctcattagtattctgaaataggctattacagatcagtgcaaactttctttaccacagatatgtttactccaaagcttcatagttttaaaaatgttatttgaatctctgttcttataaagtaacaatatttctaaaattctattatatgtgctccaacttctctaatacaaagagaattggcagaaagaacacaagcatgaatcaagtttcaaatcaacataattttttttaattttgttgacctgagaagaatcacttacctcctcctttttggtaaaatagatacgatacaattctttctcttatacaactcagcatttctgtaaataataggagcagatagctatcttacataattgtatagttcaaaagtcaaccagttatcagtaaatatgagcaacatacattatatatgtctagaaaatatattaatgaaacacattattttgtataatcaatatacactgatagtagaaaagttcatcaatgtaatctttatgtttggaaatctctttgatgttggctaaaagttcagtgagtcttcaggtaaatagaaggcatttttgtattcatgatgaatatcactcagatgattaatggtgtctaatgagtcatgccctgcagaatgtcctttctaacaatgtgattcagagtcagattgggatttagaggccagagcacgaggaacttgggagaattgtacagattgggcaagctctggagatttcccctgtgagaatacttgaagaaatctcaaccagttttcccagagaatagacaattagtatgcctgcagggatcaaaagagttggtatatttataaaatgaaagtttttagctaataattgaaattatgcaaattagtgaggaatctcttaagttttattaaatttgttctttgacaacctcattcttgtatattactcagtcttattctcacctcatcctagtttgtctcccttcaccttctgcccctcccccacaccaaagtccctcactcacactcatgatgttggggatccattgcgtttaaccagtactatgtatgtggcctagatctgtaaatatccattggctcctggttggactcaccagtgggtacacaaatgaagagtatgattgtctgtcccccagaatccagcaatagccaatagatcagggcagtgtaaagttctatgagccatacttttttgacaggcccagctcagtgcaagaaatttcaggaagcagcggctgttgtaagagcatagttagaaacactgcctcatactgtggagatattttgcagttcttctccatattttctggcactcatatactttctacctcctcctttgtgatgttctttgagtgatgagcctttgagtgagtgacataaatgctccctttagatctgaaagcccaatatcacttattcttagcaagttgagcagccaagtatctccttatacaacatcatggcacaattttttatgtattgttgtatagattatgctggtttagtgaattagtggttgtgggttttcttccaatacccataacttaattggcaataagtagttatataggtttccagtaccaggaattgtgtatctcttgttgactgaagtctcaagtctaattagagaactgttggttactgccaaggtatttttgctactattgcacctttagggttaatatacaatgttagtgtcttatgtggttcatagacatcatacttggttatcttcattctttggaggcttgcatggtgccttctgttatgatgaaaactaatctgggggtgatattcaggctagtttcagattaggggtttgtggactctgtttctgaagtgcatggtatcttcagcaataattactctccttccacccatggagcaatgaagagcaacaacagactgtattgtttaggagtctcttagatatccctgtccaacaatcaaaagaaggcttctcatgtctgttattaatgcttttcttaggaggtctttcactcttggaagaaccattgtaagtccatatgataaaagatcttttaactatacatgtatatttatacacttaattgtgtgtatgataatgtttgtctgggtaaatagttaatagcatgattccttttcatatttcctaatttttattttatacaccctctgtttcttctgtacttctctccacactctacctaaagagtcctccttttgccattttccatatgagttcacttgcaccctacaattccatttcattttcctcccacaaagatcaaaaaccataatcaatcaaaatgagcagttgtgaagccctgcgccaatagatacaaaatactcacgcacctaagtattggggaacattgctatagaggatgtgggatggttgtaagagatagagaatcaggaagtttgctatgagattctgtctcctagtaacatcaaaacctacatccctgaaatgtcaactacatgattggccaaacatgagctggaaaaggatgacaccaatggacatgacaaaggggacaggaaaaagtccatatccctcacaaagaactgcaggcaactgagaaaagctaggagcataagttgttttctccagggaagagtctatccattagacatccagcatgaagacatcagccctgaaaacatgcatacaacattatatagactgaactggtgtacttaggaacctatgcatatatgtgtacatgtatacatgcaataacaattagtaaataacagggatgaatttgcacgagactagagaagggtccattgaagaacttaggaggaggaaatgggagcgataaattatattataatctcaaaaagaaaaaagaagaaatgaattgaaacaaaaaagaagtaagcttccacctggtgttttcaaacatacttaatttagataaatctcctctgttccatcatgtccccatctatgattaaaccttaatgatctccaatcatattgatattgttataaataatagaatatttgtatggataattattatatattatatacaagtcactttttttacagatgtctttccattcactgtttattatgattaacactgcaaagattgtgtagtgccatggtgtgttgttgttgtttccaaagagattttatttcttttgaatttttactcagtaacagggtatgggatgctgcctataattaactgtagtggttatgttaatctatattcaagtcagaaatatgcagcagttactcttctccatgcccattgccatagtagattctgtgttaaggtaacagccacttgtggtttgggctatcccagtgccaggattccagacacctgacatactgctcagatttcaaataggttcttgagatctaactcatgaacttctgtttgtacaatagccacttttccctctgagtcatctccctagcttttcaaatttaatttttgctaaattcacgggattaggaaagatagtaagacctgtattgaaccatctctatgataaacagccaagaaatatagttgaatgattcaactgaatacctgaaaataaggaaggaaaatgtagttagtatattcttggagagtgaaaagtttagaggataaggtagaagaaagagggataagtatcactcaataaatttaaaggaggagttagctcctttttccatgactttcaactttattcaggtgatccctccatgggttagagatgagaaggagaactggcatttttaaagtaagtcttcttatttcaggtagcacttctttaaatacaaccttatattttagacattaagcaaacattaaatatctgttgtgttcatttggatatccctatgaaatgagcacagttaaataacacaaatgtagacaaatagcacaaatccatgttacattttagtctggaaattttctgacacccaactgtgtaatacatcttcacaagaaacttatgaatgtgtcttctctttgactggtttctctatgcacctgcatacatagatttctattgatgtgacagaaaaaatattacaagaaaaatgactgaatatgataatatagtcatttgagtttttcacaagctattcaggttttactcttctgaacaagatattatctttttgaccaccaacaaactgttgcagaggagaagatgtcacttcaagttcttggattcagtgtggtaaggaaaatgtgtttctgtgtagagttaagacaaaaaaatgattccagatggtgtgcatccctaaaagttaaaataaaagctgtaacattattttgacttcagtacaatctttgtgaatgcactcttcacctccttattccttaggctgtagaccagagggttcaacatggggatgaccatagtatagaagacagatgcgattttgtcagtgtccatggagtgactggagctaggctgtaagtacatgaatatgactgtcccatagaaaatggaaacagctgtgaagtgggaggcacaagtggagagagccttttgatacactgcagctgagtgcatctttagtatattgatgaaaataaacatgtaggatattaagataagtataagagcaaaaaagatattgaagctggctacataaataagaatcagttcattgacatctctatcagagcaggatacaatcattactgctggaatgtcacagaaaaaatgatggaccacattgacctcacagaaggagagacttaatgcattcacagtatagatggaagcattcaataaaccacagatataacagccaatgactaaccatgtgcacacacctgttgtcatggtggtggcatagtgtaggggcttacacactgctgcatagcgatcataagccattgagaccaaaaggtagttttccacattggcaaaggctgcgaaaaagaacatctgagaggcacatgcattgtaggacatgattttgtctcctgaaaagaatccagctatgacctttggagtgactgttgaagagtaacaaaagtccactaaggacaggttactgaggaaagtgtacataggggtgtggagccgagagtcaaagacaataagtagaaacatccccaggttccccaccagggtgatggtgtagatgaggaggaaagtgatgaagaggggaagttgcagatgtgggttattggtgagtcccagcaggatgaaccatgtcgcttctgtcttgttctccatcaatgatatcagttaatcaacagaaggctttaaagatttttttttaaaaaaagtgtagaataagggactggagaaatggttcagcggttacaagcactggctttctattccaaagcactcagcatctacctggaagctcacaaccatctataacttcagtaccaggggatctgacaccatcttctggacacctcagaaatgagacacacattaggcacagacatacatgtaggcaaagcactcacacacatggaataattcttaattaagaatagggtaataaaggaattgaaacatgtgaatgttatttattttctaccaaacatatatatatatatatatatatatatatatatatatatatataatttcaactgtgtttccctgataagtgctactacagaaatagcctgttctccataatgtaatgactgataaattgttacatctatctaaattgtgacacacagagatataaattttatgcatatttaaatatcataattaccaatttctgttttggatccaggtaaacttttcacttattgcaagctaatgatctaaataaataacttaattataatgaataattgttctcttctgtttagtcacagtgacatgaatagcatactgtctgttaatttcatcttggtcactatatagttattctcattaaaaatcaagcaagtgagtattccctaacagtgaaatgtttattctgaatattaaaaggttctgaatgaagtaatgagcttgaattgcattttaactcttctttccacacatgttctcatgattttaatatagcatgtctagatacactgataaggatatatccagaaacatgacgttatgattagctcaaagattgttttatgttgaatcaatattgttcaacaatgtacattctaaatttgttagaatgttcaatcttagaaacagtttggaatgaagaaatgtcattaactaaaacatagagttaagttcttgtaagagatacttaccagatcagccactgacaacctagaaagtacctaactcccctaaacactatattgctatctgcaaaatgaagacagtaatgaggcctacttggggtattattgggaaaataaagtagtatatcaaaggcaagaaaattctggattttgagcatggtttgtgagtactactgaccatgttgttattgctagttgataatagcatacagagctttagttctgggtaagttttagtcttgaatttttccctccaaattgccttttcggcatttgggaccctgggattgtctgtgccttcttatgaatctgattttactctaagaatatcagtgctggtcatgcaatctcacatgaaatattcctttcaaaagtttcattcttgtaatccctaattttagatattactttcctcttttgttaatttttagttttatttttctagggatatcatcccacagtaagaacagaggccaaggagtccatttacctactttatggactttgtttatctcatagacatgttgttcttatagtgtaatgatacttaaactttcttgtttggcttggcatatttggaaggatatcaactctaacaattatttgctatcctcattttcttgagcctttggcaactttatatatgtatacattgaaaacattttagttgccaatccatgtcatgtgataaattttagcattttctatattaactacaaatagtgtgtggtgtgtgtgtgtgtgtgtgtgtgtgtgtgtgtgtgtgtgtgtgtgcatagttgaataggaagtactatttcttacattatttgtaagaacacttatgatctaataagttacatggttatcttagtttttgtaagtggtatgaaaaacactcaagatgtaagaggtatgattccatccaacaatgagcctgaactcaaggcataagggttgaaatgtggttgaaagaatatttatttctatcccttcactagtgtgcagaaagatttttttatctcctgggtctgtgtcttttgtgactgtttttaatctctaagtaaatcaaacatatagtggaaaaaatgaagttacatcaaccaaattacattttatattccttctgagaataacgactttatgaatcattatatctcctgcagtattttgacaactacacgtatactcagcatttcaaaactagttttagaataataaccatgtagcctttaaaccgttttagatctcaaagtgatttttaagaaactattttcaagtaattcattatatattatacattcataatatatacacatatattacatatatgtatataactatatcccatttctttttcaggaattatacttgtggctaagatgttcatgaaatataggtagccagtttttagtagggaaatgttttacataaaattgtccctctaaaatcttaaaactccactattcagtatttcacaatcctctctaagaagcttgtccttagaaaatgatcaatgtttcaatcctgtctaaagaaagaggggaagaaagaaattctgcacagatcaagttctgaattcatcatgcattactcctcttcccttgaaagagtcacttacctccttattaggaatacatactacaggaaaaccagacaagattactcctctcccatagtacccaggttgtatctgtatataaattcagaagtccatgaggaactttccagataagagtcagtcgctgtgatttttatctttgggtgttttcattcagtttgctggaaggcccatagctgatcttcaggtgagtcaaagacctgcatgtgttaacaatgactgccattcagaaaataaacagcatctaatagatagtggaatgaagtgtgttcctagtgagccacaatgggatttcaaagaataatacattgttgtgtggatagaaatatagacagtcagtgagctcaggatggtgtcccaatagtgtatatgaagatcctcatcctgtcttcttaggagaaaagcaattaaccagccttggggaccaatctagtttctatgtcttagaagttaaatttcatttttaattgataaatgaaaacacaaaagtcatacaaattaatgagataccaggcagggtttctacacataaagtatattgtaaaagttcaagttaggctaagcactacacctttgtggaaaaataactttcaaaatccttccttctagaattttctctttgtttttttgggggccccctgcgttgaggcagggtatttctgtggctttggaggctgtcctggaactagctcttgtagaccaggttggtctcaaactcacagagatccactgcctcccaagtgctgggattaaaggcatgcaccaacactgtccggcttctcttcatttcttctaaaattttcttttcttttcttctagtcctttcaaaaacataatacattattgttatctatagtagcccttgtgcccaatagtacatcttgctgttccaatagtacatcttgctgttcctagtcaactgtaacttggcataatatctaatgatcctttatcattctctctcttttttggggggggtggttgagacacccccaaaccttcctggaaccttcctggaacttgctctgtagacaaggctggcctcgaactcacagacatctgcctgcctctgcctctcgagtgctgggattaaaggtgtgcacaaccaatgcctggctcctttatcattcttttatgtattgtcccttatagtactctacagaaaattgtatgtcacattttacaaatatgtctattatttctattgaacactaatttttaaaatttgtattacatttgtgtgttatttatgtgtttatttactcatttatggtgtttgcaagtagaaggcagaataacttgcagaaatcagttctctcctttctacatgtgagtcccaggatttaaacaaagaccatcagggatggaaacaagctcatttaccactaagccatctcatcagttcctattccttaattgtttactattgcattttgtaattatttttctactcggcaaatcagaaatgttttacagatgcacgattttagctgtattttcctatgttgtaaatttttcttaaaattctgtagactattttctttgccaatcatattctttctaccttaagacaatcatgttttgtgctcatttctatttgtttatgttttatgtgtggccatctgtaaaatgaaacaaaaaatgaaaacactccatccattgccgtgcaatgacctcaaatgtcctcaatgtctctctgtattttccactagtattttcatggtttgtgcctttaatttaagtcactcatttttttgaagacagtcttgtagctggcaagttaagacatatgtagttttcttctttaagtgaatagatatcttggtctcccaatctcatttattgaagacagctccttgtcccagtgtgttctcttgggaaaatttcaagctatagatacatggcttaattctagaatgtctgttttattgatgttttgggaaaggtcccatttgatcatggtaagtacttttttctgatgcatctcttgacttaagtttgtaagtaccatgttgaggaaatattatctacactcatcagatatatttagcttccaattccctttttattgtgccctgtcttagcttcattttctgttgctgtaacagaatgttctgacaaaagcaatttaaaagttagataattaatttatgactcatttccaggttatagttcatcaatagtgggaattccaggctgcaggaaattgaaggcactcctcaaattgatcatagtcaagagcagagaacaattaactaatgctgcattatgatgatcagctcactttctccactcttacaaaatccaggatctcctgcccagagaaggatgccacttacagtgtccagccttccagtaaaccaagacaatcccccacagaaattcacatatcagtctaaactagacattccctcccttcccaggtgactctatattctgtcaagtagcaaaaaatattacatttctctatctgattttggcatcaaagattttgtttttatttatataaaaattgtgttgaaaacagaaaaatggaaattaattaaaatatagttataataagctcttgcttttactctctcttaactctgatataccccaactccaaatagatcaaacagctcaacataaaatcaggcacatggaacctgaaagaaaagaatgtagggtcattggcacaaaaaaagacttcctgaacaggccaccaatagtgcagtcatgaagactggcaattgataaatgggaccccttgtaattgaaaagtttctatatggcaaatgacaccatctttctgacaaagcagaagtctatagaatgggaaaatatttttaccaattacacatctgatatagaactaatagctaaatatatgtaaactaatcaatactttcatttaaatggggttagttataaatggtaatgagcacagtcaatctctttttaaagaaagaaaaggggaataggatataggaatgaatactttgctttggtatagattttcatttattgatacaactttaaggtcaattttgtgatatgtatatgtctcctcttgcttaggtattatgtttatacagatctttttcctataatagtcagaacttataattaggttagttaggttttctagatatagagatatatttgagatggttagatattcttcaaacctttccaagaccttcagaaatatggcatttaaatggcttagggcttttcttggcagtgagacacaagtgctcctggcacaccaattatgtcagaaaggaggatgggcatcgaagaaactcgttatggagtttgatttcaacatggcaagattagccatttgggcaagaaactgctcttgcctggactgtttgttgttgtataagctggacatagaggacccacaagaaagtgactgccaaacttacaaaacaagatagtactgaagggttcctgttgaaatggagaagtgtgccagacacactgtggcctatgggctaaagatggatgccccagcattacagagaagctttgggtgactatccaggtagcaagatgtcctatcaattctagagtttatatattatccttctgtggtctttgatagagttgaagacagatagttatggttatagttttcttcagttattataaaagataagttatccttcttttatttagacagaaagaggagatgattgggaatgtactttgtatgtttatcttattgattgttaaataaaatattgtttggccaatgagacagcaagtagacgggaataggagtcaaagaggattctgggaaatgtagtagagaagtgatgatccaggcaggaaatgacatagcaaggagactcatatttaagcgaaggagaaacaggaagggccctcttttccactccgttcctgctccagcggcacgatgtgatccaccagacaggagggacgccaacaaggcgcctgataagtcttataaaatatatagatttatgataattaagactgagctaacagatgaggaatcctagtcattggccaagcaacattgaacctaatacaagtttctatgtattcatttgggcctaactcgggcaggcggctggcgtaaagcatacacgtggcaatggggcttaggcagcttatggtggaaagatttatcgtaacaaatactagataccaaaaaacaaatagtccaattaataatggagtatagaactaaacaaagaatcctcaataaagaaaactcaaatggctgagaaacaaaaaaatattcactatccttagacatgagagaaatacaaatcaaaactaatctaagattccatcttacccctgtcagaaaagctaagatcaaaaacacaaatgacagttcatgatggtgaggatgtggaataagggaaacactcacccatttctggtggaagtgaaaagtatacccactatggaaatcagtatggtggttacttagatagattggaattgatctacctcagtagccagatatatcaatcttgggcatatacccaaaacatgcttcattctaccacaaggacactttcattctaccacaaggacacttgctcaaccatgttcacttctgctctgttaatgatagccagaaactggaaacaacttagatgtccctcaacagaagaagagataaagaaaatgtggtacgttaacaaaatagagtattgctcagcttttaaaagactgggatcatgaaattttcagacaaatggatgtaaacagaaaaaaatcatcctgagtgaagtaaataaacaagaaccagaaaaataaatacagtattgttcacttataggtgaatattagccactaaataaatgataaccaagctatactaagatcaatagacccaatgaggttagatatgaacttaagggactagggggaacacaagggtctccctgatagagagaaactgagtggattttatggggaacagatggcagaggaaacaggaacaaaaaacaactatcaggtggggaggggactgggatgtagggttgagggaaagattgcagggagggacagatagaattgagaggcatttgaggggtggtatgaaaaactagtgcaatggaaacctcctaaaatacatgaaggttaccttaatggattcccaaatatgggggagccagagttacaacttgccatctctcatcaccaaatgaaacttacagtaccaggattggattacacccaattgagttattggccaaaggggaaccatgaaaattccatacaaccctggctgttgccaagacgataggttgctctccaggtacagtccaaaggtcttcaggtacctagtatttttcagcaaatttcaggtcctactcaaaataaacacaaattctccacctgctggtcaaaagtggttactacatctggagatgataccactggtgaatatggccgaatttctattgtctctcccactcggcaacctttccaattcttatgtaaattcaatgttcaaggaagaggttgacctgctgaatattgacctatttgccttattagctgtgaatgtattaatatacatattgtcattcctaaggaaaaggaagaaggctaatttcaccatctgcctacaggacatgcaaactttacgtaatgaggttttggagaccagattggcccatggtacatttatgctgcaggtagaacataagctagatgataagctttgccttatgttttatacaatataggcagagctgtctactatccaagctgaaatgcagtgcatttataataacataaacacagaagatgctccatttcagaggtgttagaggctaggtggtcagaggaccatgatgaattaaagaaaatatgtaaccaactggaaactcagatggtctctctgtcctactctctagatactaagatgcaagatacccaggataggtttaaacaattggatcaactggaaactcagatagcctctctgtcctatagttttgttactaagatgcaagatacccaggataggtttcaacaattggataatgccattaaatcaatggctgaaaaatacaagagggatgatgatagagttgaatctaagtttcaaagcttgcaagatgaattacaaaacagagctaacaaactagaaatgtctatcaagtcaattgctgaggcaaatcacaaacttgattctaaatttcaattcctggatggcaatctccatgacacccagattctagatagggacaaatgtattacacatctagaaaaccttgtagaacaacagtcacagcaattcatggattcactatcatgccttgaatctttcatggtgaatgaaattaaaacttcccatgaggacatcatcactaggctaaaggagcgatttgaggatgaagagacgcaatcgcttcactctgaggcacctactccaaacaggtatttcaatcattctaacatccttatgcgtacaccattggtatatccagcaacattggtagaaaagtcaccaactaaacactcccagggacaggtggcatatgtatggcagcctatccagttgaaagatcttagcactttaaagaatcagttgtcttgtatggtctttctagcccatacataaaacagctattatattcatgggccacctttagcagattgatgcccacagattgggtagggctggtgtcagctgtccttgagaattcttgtcaaatcgaatggaaggcattactgagagagtaaggaaagttcctagagcgtcaagccattagagatggtcttgacgtgcctctttaaaagattctaggagaaggtattattgctgagccacaggttcaggctgaatatgatgaccatatgctgaccctatgcaggaatgcagcactaaatgcatgggataaggttcatgagccaggggaacgactggaagcttataccagaatagaacagggacaaacagaactatttaagaacttcttagaccggtttaccagagcagtagacttacaagtgacagattgagccataagacatttgattgtgtataccttagcttatgacaatgcaaacccaatatgcaaaacaatacttttgcctttgaagatcagatcagctccactagaagaatgggttttgcatacttcccacattgactataatatgcaagatgctggaatctgggcaggagaagctatcccaagaggtttcaaaaggcagcaggagattaggagtcccagagatgatgacagaaggacttgggaagaagagacaccttacagggatccatacaggtatcaagaggccagggttcattgctactatgaaccagagcctcgaataggaaaagccttctccaggagtccacagaagcatcaggagaatagaggtttcagctgtggtagaatgggacgtataaggagaaattgtaggcaaagaaattctaacaatccctcacgtgaaaggccactgccctctgggttgtgtaggagatgtggtaagggcagacattggactaataagtgtagatcgaccagggacatgaaagggaacctgttaaagccggaaaactctgagtgggggattccagaattcccccacatcgaagaaggttctgtcatttccagtaactggagaagacaatctgtcacaggataaatagatagttcttcatctattgtaaaagatgacaatgccatagatggtaatttggctagcgataaagaatcaggtaagactgaactagatgaaaagcacacattttggcagacctcaatcaaagtcaagcaccctcacttatgggtacaaattaatgatgaaattgttaacgggatactagacacaggcacagacatcactatcattacccacaagtcctggccaaaggaatggtcacacagggaagcgaatgtacagttttttggtattggaacactatctagagtttaacagagtgttttctcggtagtctgcattggaccagaaggacagaaagggagactaaaaccttacctggcaaatatagctataaacctctggggtcatgatctcttacagcaatggaatactcaaattaacatccctccaatgtcatatacaaattatagaaaattgctggatagtaggaaggatcgggtaagacgctatggaaaatggttaccaaccatccaggctgtacagaaactaaatacaaatgatagaccatcagaggaaccaaaggccctgccattaaaatggcttacagatgaacctgtctggataaggcaatggcctttgacctctgagaagctagaggctctagaaaagttagtatagggacagctagaggctggacacatagggtctaccagcccttggaattctcctgtatttgttatcaaaaaggagtcaggtaactggagaatgctgacagacctgagagccataaataaggtaattcaatgtatgggctctctacagcctggaatgccattgccttccctaatacctaaaggatggcctataatagtaattgacctgaaagactgctttttcactataccattacaagaaagtgatagagagaaatttgcatttactgtaccaactcttaataactcacagccagttcggagatatcagtggaaggtttttacctcaggggatgataaatagtcctactttatgtcaacactttgtacaacagcctttggaaataattaatgaaaaacttccacaatctcttgtttatcggtatatggatgatattcttttatcagatgccaattaaggaaactttgaaacgtatgttagacatatggtgaaggaagttctgcctagatgggggttacagatagcccaggaaaagatacaaagaggagattctattaactatttaggttataagatagacttacaaagaattaggccacagaaggtgacaattagtagggatcattatcaaactcttaatagtcttcagaagctactaggagaaatttctcagttacagacaattattggggtagaaggtcatgacttaaaacatttaaaaatggtgctgaaaggtgataaggacataaagagtccacgaatatcttccgaggcagaaaaagaactacaatgggtagaaaaaagaatattgtcatccagagaatacccttctggaattctgatgcagagggaagacactatattagaatggatatttctgccacataaacagaataaaaagttaaagacatatatagaaaagaattctgatttgatgttaaagggcaaattaagactggaacagatccagcagaaattatagtacctttaactaatgaggaaattccctccttatggaaggataatgaatattggcaaatagctattactgaccttttgggaacaattagcaacaactatccccaaaccgacagaattaaactcataaaaaagacagtctggatttttccacgcattgtaagacaaactcccatttctggagttcttaccttctacactgatgctaacaaatcaggtaaggctggatataaagcaggtgaggtaagtaaagtagttcaaagtccgtatacatctgtacagaagacagaattatattcaattatcatggtgcttattgatttcacagaacctcttaacatagttactgattcccaatatgcagagagagtcatcttacacagagagaccacataattcatccctgatattaccaaattaaccttgttgttcttacaatcacaggaaacaatcagaaatagaagcaatcttctatacattatgcatatcagatcccctacgggtctgccagtcccaccatcacaaggcaatgatgagattgatcgtttattaattggtactgtgctagaagcctcagaatttcattaaaaaaatcttcaggtaaatagcaaaggtttaaaagaggatttctctgtcacttggcaacaagccaaggagatagtgagaaactgtcctacttgttccttttataaccaaactccgctgccagcaggctgtaatcctaaaggcattcaggggaatgagatctggcagatggatgtctttcactttacaggatttggaaatttgaaatatgtgcatcatactattgacacattctcaggtttccaatgggctactgctctcaactctggaaaagctgattctgttattacacacctgctagaggtgatggcagttatgggtatacctgcacagataaaaactgacaatgctccagcatatgtctccacaaaaatggaacagttcttcaaatattataacataaagcatgtcaccggtataccacacaatcctacaggacaagcagtcattgaaagatctaataggacacctaaggagatgctccatagacaagctggtaagtcaacccccccccaaagattgcataatgctttattgacactaaactttcttaatgccaatgacaaaggacaaacagctacagaaagacactggactatggaaaaaactgctgaactgaatcaactagtgtacttcaaacttgtactgaccttggtattgaagcctggacatgtgttatgttgggataggggtttttcattggtttccaccaatgcaagaagaaaaactttggataccatcaaagttgatcaagattcgagttgaaaaagacaaccttcttgacaaggacaagtgacaggtatttactgaggtatacctcctaaactaaataaaagcctcccaaaggaaagggaagtggtctgtttctatcttcacaggaaaactcatctccagaagtccaagaacactacatggctagatgcttaagaaaagaaggtagctataactatcaaacaaaaggaatgtgtcatacggtaaactttcatcatttcctagtcccgattcaagtaaatcaatgctggatttagagctggatttggctttcctcccctaaaatccaagcatgttgtttaactaaactttagagtttctgtattatatcaagaaggcaattgatgtaatacagaataaatgaagaatttgaggactatcttttgtcttttcttggctctttctttcaaagtttacaccctctcataattgttattttcccatggttgcctttcccagcatgcactcatacacaagaaaacatttctctgctaacacttctgtttgagtcccatacagccaatgaagacccacctgacaacaatccctggatgctccggaaaaggaattgggccattcctcctagactgcactggatccaacttactccatttcaactggcactctgaccagagcttccagtattgacttcaatcaagttgaggatttcaacctagatcttcaatcaagcaaatcccatctaacatggactggatataacacattagagactttgactatactaacattttcttcccacaggaccccacaaggctaccattgtcccatttcagcaggaagtaacttggaagatgctacgcccccattccccattcttgtctattagggtggtgtaagcctagttaggattaacttttttattgtttagggttggggttagaaggaggcattcaggttggacacccctttcagatgactttagggcttagttggaataggcatagttaggatgttcaatagcagattattgtatcttcttgtatttcaccttaatgattgttcattttggatattttgcactattaagttttaatcctcttttagactaaaagaggaattgtagggagacactgtaactatgcctcctaagggctggctacaggtgtgcttaaccatgcctgtcagggtgtggtcaaggggtgttcaggatgactcatggggggttcttaaagtgctgcagacacgtgggagcctcttctctctggcctccctagcttgctgcctctgggcatgctctggcttatgcatggctggtattttctgaataaagatatcttaaactacaggctcacgtttcaggaaagtactctgaaagctaccaaaagagaaatgtaatcaccaaccctgtcatgaaacctctattctactatgcaatccttcctgcaaaatattctagggtaattgttagaacaaatcttataagagtaaccaaccaacctcttatttgaattaaggctcatttcacaagatgaaactcatatccaacactgcttgggttatcaagaaccagagactatatagcccacaattctagggtgaaaccaaatactactggtctttaaaacaaacaaacaaaaagtagtgataaattgattcctagtgaaattctgctttatttagccattattagagaagctacctactgcatcatgggaataaatatagagaaccactatcagacaataggcagagagacacatatttctaaatagcatgtccatcaaatcccttccctcagagctcatgtaaccctgtgaaagagaagggagaaacagtgttaagagacagaggtgatggaatacactatgacaaggtcctctaaatcaactgagcaaaggtcatatgaactcacagagactgtggcatcatggatagggtctacatgggcctgtacaagctcctcagcatatatattacagctcctgggtcagtgtatttgtgggactcctgagtgtgtgaacaactgagtctcttgttcttgtgccttctcttaagctctattccttctgtttgtttgccttatccaacttcaaagtggtggtatttgttttgtcatatattttattttgctaatttttataatgtaattctttatagattctttgggaaactcacatcatgcacccaaatcccactcactctcagtttttccatacctgcctctcacctcttcagcacccccccaaaaaaactaccctcaaatcaatttcaaacaaacaaaaaaataacactttgctcctgtgtttttctaacacatctttattcatcctcatggcattgagataagtgatgtgccatgtagtacactcttttgttcattcagccttacccccaaaatgctcattgctatgaataattggccttattcaaggcctctggcacaccaccatcactggaccctgataacctgctgttgcccatggagtcatgaatatcctacagttattgttccactgcaccagtcccttcaaacattctagtaggttatagatggggtagatgttagggtgggccaaggatgtgtctggatgagagctgagctagttggtatgggtcactgggacttcctctcaggcaagaggtagagccaactctcctgggcccatgccacagtgccagttctcccatggccattgtgaggggtgggaacacatcttctgagtgtggaagtacattctatcatggggggtagagccagctgtctctctcctgctacaacgtctggcaaggggcagggccatctatctccaggccagtggggagtgaggctggcccagcaaaccttcaatttcaacacatatagttcctatttttatcttttaaaaacctgttctttggggtattcaccaatcttattacaagggtaggccagttccggcatcctctccactattgctagaagtcttagctgggatcatccttgtggattcttgggaattaccctagaaccagggttctccctaaccccatagtggctctctcaattaaaatatctttcattgctcttccactgcatccctccatacctcgactatcccattccctcatgttctcatctacccccgacacttaccacttccctgcccccagtttacccagaagatctcatctaatttcccttccttaggtgatccatgtgtccctcttagggttctccttgacaaataccccaactatcatcatagggccttcatccagtaattgatggagccagacacagagatccacaatcaagcaccaagattccagttgaagagatcaatgaggagatatatgagcaagggaggtcaagatcatgatggagaaatctacagagacagctgaaccaagctcatggaaactcatgaattctagactgacagctgtggagactccagggaaccaaactaatccctctgtatgtaggagacagctgtgaagcttgaactatctgaggggcccctggaagtaggaccaggatccaatcctggtagctactttgttggagcccattccctatggtgggatgaaatgctcagccttaatgcatgggagaggggcttggccctgtcccaaactattgtgccagactttgttgactcctcatgggagcacttacctgtgagtaacggactgagggtgagctgggtggcaaagagagtgggaatgggagaaggaaggaatgggagggagaactgtgcttggaatgtaaaatgtaatctaatggaacaaataaattataaaattcttaaaataaaattaaaaccactgtatttgaccaattataaaatatgatataaaacttgcaatttaggataattaaaatttaaaaactaaaaaagtctgttcttttttaaagagaaaaagaaagagagtggatctggatgtgatggaagatagggatgaactgaaagtagcagatggaggggaaactgtaattttgatatatgagaaagaaacccactttttaaattttttaatttaaattagaaacaagattgttttatgtgtcaatcccagttccctctcccctcccttcctctcctttccccaaacaacaccctacctatccaataccatttctgctccccagggagagtgaggccttccatggggggggggtcttcagagtctgtcatatcctttgggataggggctaggtcctcccctatgtgtctaggctcagggagtatccctctatgtgaaatgggattcccaaagtctgttcctatgctagggataagtactgatctactacaagagccccaatatatttctgaggcctcctcactgacacccacatcactgaggtctggatcagttccatgattgtttcccagtgatcagtctggggaccaagagctcctcttgttcaggtcagctgtttctttgagaaacccatttttaagaaaatggaaaaaatcaaagatgttgaaaatagaaaaatgaaattaaaatacaattatattaaattccccttctttcttctctcaatccccttccatacttctgttttctcttaaattcatggattttgcctcttcccctgtgtgtgtgtgtgtgtgtgtgtgtgtgtgtgtgtgtgtgtgtgtgtgtgtattccaaaatatataaatgcaatctattcagtccgtatgttgttgcttgtatgcatatgatttcatgtatatgttataatgacagagaaatttggtataagtctttaaggtttattcaatttcatctgtgaagtcacttggcctgatggtctgtctgatggggtgttttcttatttattcaattcatacattatttatgttctgttaggccattgataatgtttttataatacctagcgagcaatattacaggtaaggtatttagagttgtacagatgggaatgatttgaagttcaggttttccaacctcagagaattttctgtttcagctgctgtgggacatgttaaaatgcttgctcttaggagcagaacaaactgttgtacatggctctctttctacaaaaaaaaaatgagagagagacagagacagagattatacagtggctaacttggggcataggtttaattttctctttctttaggcatattactctgtgccttttactgagctaactgaaattctcctaatattaagtagaagttatatggtgaaactcttcaatgactctctatgctatgaagtatctttgtcacttgggccatttgatccagaagatgtaatatttcatggttattaaaggtgcttttgaagtagtgagtcactgcatgtgaattttagtgtggatccttggatttttggaagaaagttctgccaggtgttaagatgaattaatttgtttcaccaaacagattttgacctgagactagacttgggtcatttaaaataatttctgtttgttgtataatttgttttcatgaattttaaaattatcattaaacatgtcattaatcttatatttaacatctgtttttttaaacaattatgatagtgtttgaaatatcctactccatgaggacttccaagaaattattctgtctaaaagtgagaagtttgagaaatgtgtatcaaaagaaatggaaaaatacttcaaggaaagtaaagcagaaaattctatgtgtttctgaaaatgttctgcatgttcatgtggatgcatctcatacaagatttacaaaaattcaaagatccccatggtgccgttgagctcaattctatataaccaaactctcatgttaaaataatcactttagaagcttagtattactattactcaattaaaatatctctgaaatctccaatgacaaggacatcaaatcagatatctatggccatgctttgtaaaagagttagagtcacttctgtggttcaatttgaagtttaattagagaagatagaaaaggcaatagtaagcaaatgaattaaatgttaatatggtcttggaagaagatagatcctgtgagaggatagtttatgtggtgaatgaaggactagtgtataaatgggctgaggaaaaaaaaagactaaatttgtagaagaaataagaaatattgggcttaaatttaaattctgaaactaatatcaagcgacaattctttttaaaaacattttatacaacagttttatctatgcatatactgaattttagtttttctcactctttgttacccttcttctcccaatgaaatccttcttctcaacaagtttccatgctactttcatatcttttatgtgtgactcactgtgttaaaataaggttgcttatatgagtattagtaggaggttacttactgaaatatgagcaacttatgatagaaaaatgtgatactctatccactatcaacaatcaatagtccttagagatgggtggggcccttgggcctttcacctttccaggatgaaatattgagggccgaaatcttatgcagaccttgtgtaggtaacaactgtagtgaattcatgggtacagcagctgtgtcaagtccagaagacactgtttcagagatgttctctcaacctctggcccttaagagccttcctgaccacaatgttccaggatccttgtggggtggggaggatgatatacattgcctgttttaggataagcagtcagtctacagatgacagttaagaaagccctgtatagacttacaagaaattttgccatcacttcacttaattttagaagccaaaattacccactatgctttctgtgattgctggaaaccatgaatgatggtgggttaattaaggcacagttcaaagacctgataaaggggaaagggagtagagaccaattgcttgagatccaatagccccagtatctagatgtgacagaatatagatgtctctctcaaagaaaggaagatggggagaggaaggggagtggaagaaaggaaggaaggaagaaagagagagagggagagagggagggatggagggagggaggaaagggggcagtttctacttcattctgtctaggtgagccctctcaggtaggatactgggcacctgcattgaccagcatattcttctttgctgagccacggctttcagaaatgttgttataagctctcagaaagatataggttgggacgtttgggttattgatttttttccattggcttttcttttgctctgctttttgttttgagacttactatgtaacttaaattagactcaagcaattaatccatgcatatcacactcttcattgctgagaatccatgggtttgccaacatatttgacaaaaatagtttcattactaaagtattacttaatacagtcaaactaaaactataaaacttctacataaatacaaagtatatttcttcctgaaaaattggccacatatgtgtctatgtgtcctcccacataagggacttttcatgtactccagtgcatagtctgtattgtgttctttgtacaaacattttcactgacacaggtagaaatgagttgatgaaagatgagataattgatcaatatctattgtatttgataagaaaaccccagcccaattagattcccactcagatattacaactctaaatatctctgtttccctgtaaggtatcactttaggaaattgacttcagagttagtttttttttttttttttaatcgagggcatagcaaagaaaccaccataatcactgctccatgatctagggatggtttttattgtaaataagagagaacaaccagaggcacctgaaagagtcccaagaaaagagaataagaaacagactagaaatggccaaggctatcttcaagacaagcaagaataataacaaaagagaaaatggcaacaatagtggaacaagagaatacctcatatagagaacaaaattggaatctagaggagggaaacctgctacccacaacaactgggaagctattatggtggaggagaagaagatgtgagaacggccaggactctagactgaattttgaaatgtgtaacaagtatgtgtgagtaggaactgaagaagtctgaaagccagcatgaacttttatatacaagtgcacgtatagccaaaggaagtggccctcttgagtaagcagaatccaattcttttgcaggctcttgggaaatgctgtccttgggtttttatctgtcttccagaaatcctgttgtaatccagcttgagctgagcctacactgtcatttctggacttatgcactaacccttggagtttgagaaattggaattttctttcaacctgagagctttcaaatgttattcaagattagcaagttgtcttagtgagtaaaggttgtggcatgaattctagtgggtattaataataaaaacccagagacagacatgggggttaaagctaaagatcagagaagcaaagcatccagtcactagtgagctcttgcctctacctcagactgaaagggtgattctgtgtccataaatcctctgattgaatgtgatctgaatatatctgtctccaccaagccccagacttcctagacttttcctgtctcctcctgccagatgttcctctctagtgctcagattaaaggtgtgtcatcccaagtgctggtgtgagctctgtttctcttttagattgattcactctcatcccagagtgacattgaactcacagagattcatctgcttctgtttcctgagtactgggattaaaggtgtgtactactactacctgactactctggctgtggctagccttgcactctgatcttcaggcaagctttattagatcataaacaaaatatcaccacaaaacatgttttccaaagctgagagcctgagtagagcctgcatgatagaaagaaatataattgccttctacaagctgtcttttgacctacaaatcagttccatggagtaacacacacacacacacacacacacacacacacacacacacacacacacacacacacacacaatggttggatgggtggatagacagacagacagacagatagtaatcagataaatagataacaaattaaatgtgattccatgaaaaatatgtgagtgaaatgaattcaggtattgcacatctcaaaagtgtaaaatcaatattgtaaatatcattttgtcccaaaaacaatctttctgaatgcactcttgacttccttgttcctcaggctgtagaccagagggttcaacatggggatgaccatggtatagaacacagacacagttttgtcagtgtccatggcatgacttgagctaggctgcatgtacataaaaattacagtcccatagaaaatgaaaacagcagtaaaatgggacgcacaggtggaaatggccttctgatgtcctgcagttgagtgcatctttaggactgtgataaaaatcattagataggatattaagatgactatgagagcaaaaaagatattgaaactggctacacaaacaagaatcaattcattcacatgtttatcagagcaagaaagtaccatgactgctggaatatcacagaaaaaatgatggaccacatcagattcacagaaggaaagactgaatgtgtccccagtgtagatacaggcattcaggaagccacaggcatagcagcctgcaatcatccatgcacacatagctgtagtcatggttgtggcatagtgtaggggcttacacactgctgcatagcgatcataggccattgaggccaacaggtaattttccacagtagcaaagcctgtaacaaaaaacatctgtgtagcgcactcattgtatgacatggctttgtctcctacgagaaaccaagccatgacttttggagtgacacctgaagagtaacagaagtctaccagtgatagattaccaaggaaaatatacatgggagtgtggagccgagagtccaagacaatcagcaggatcatccccaggtttcccatcagggtgacagtgtagataaggaggaagatgataaagaggggaagtgccagggcttggtcatcagtgagtcccagcagaatgaaccatgtcatttctgtcctgttctccattagtgttaccagagaatcaaaggaggctctgcatcaaaacgacaaaagttacaaaaagattaaaaagttgaattgaacgtcacattatcacataatatgtactttgatattttctagatatttcttaagattgtgaattatgtatagggttacaaactattgaatctatgaaatctttaccaatgctctgcccaattttaattttatagattgttagctaaaatgtaaacagtttaataatctaatcaaaatgattttctggatgaatctatttcctaattcattctccttagttcagtcaaacatgtgtttctcatctgccaagaactgccaaaaaaagaaccattagaatacgttcatggtttcccctcaagagaattttgtgtttgattgcctgttctaatcttataaattatgaagcacaaaaggttgagtcatttattcatatttacacaagcctaatttggttatttctgtccagaatttgagccaatctttaacctattctgggtgacttctaattccaatagtctaacatatattgagctgaatttatgccaatgtacaaattccactttggttcataatgaactgagtgatttcacaggtagccattttatcttatccgctaagtatttgcatttcattattagaacaagaaacaaacctggaaatgaagctacaaaagtgccattaataaattaagaagccatgaattacactttatctcttcaatacacactcattttatgcatcttattaggacacactgacaatgttgtaagttaaagcataaacgtttgactagactaaagataatacaaggtgaactctgaaattatcctcatacatctctgtgtatattagatgtggtgggataactgacatgacagaaatgttttacctcagagagattcttactgaagatctgtcatcagatatagacatagaactcacattcctggaaaaggtgcatataagatccagcatttaccacatagtagtttactgatcctgaacaaattccctgagtatcttattttcatctgcaaaatgaagacagtaatgatatgtgcttggagatgttaccctgagaatttaaagagataatatgtaaaaggcaatagatgtgtgctcagcacagccagtttgtttatcatgttactgttatgctctcatagtgttgtggatattggtttgctgacacaccagattttggttgccattttaaaatttcactctccagtctggaaggactcaatttttcctatgctgtattagatccactgggatttttctaagctttacaatgttgtcagtctggccttagtccacaaatgtgattggtattatcataattctagctgagcctgtattttacttttgatgtgaagaagtaacttttttttcatttatttttttttacttttttatttcattttacattcaaaccaccgtaatctgtcccatccctcctctagatcaacaactgtggagactccaggggacgaactaggccctccgtatgtgggagacaattatgaagaattaacttttttgtttgtttttcgagacagggtttctctgtggctttggaggctgtcctggaactagctcttgcagaccaggctggtctcgaagtcacagagatccatctgcctctgcctcctgagtactaggattaaaggcgtgcaccaccaatgcccagcaagaattaacttttaattgtcattccatatcttataaatgacatatggttgccaaaccagagcccataagctgaagtattcctgaattatgggatgtctttagcacacagatttattttgatgttaagttccatcctggatgctattgtatctgagtctcttctcatgtagtaataccatgttaaatttcttggttataactgaagcttttgaagaatagccatccaattctaattactattcctgacctttcactctcaggatgtcaatttataagcctgatttgaacactgtcttctacctttaacaaatacaacatcaaattagaagatacttagctctacaatcaataataaagattttatatgtaactatatctgtatgtatctgtgtctctatgtcttgggggggcacaaggagcatttttattcttcactgttaagaagttggcatttgaaatgtataaatatcctaaaaattatatatccaatttttaaaagaaggtcaagatttgaaagataaaggcatttttgatataattaaaactataatttttatccatacccctgtcaaaatggataggtgtattagagttaattagtatgagatcatggggtaaaggttaacctatagttcaaaactgcttaattcattaaggactcttgtcatgaagaaagcattctttcactttgaggattagatgttatctttgcttgttgccttcctccaataagaagcaaatacatatgtaacaatatgatagtttagcctaatcatctaggatatcatatgttttggttttattcatccttactgggaaataaacatgtgccataaaactttttacattactcatgatgaaatttttcatttaccttagatttctgaagacatgttgaaatcatctaaatttgttttagaataattcacagtgaatgcagttgccttgctggttttgcatataaaaatcatgaggatttcatggagaatagaagcttaccattttccaggagagaacagccaatctagaatagcatttctgaaatcaccagatcgggcatggaatactgtataagtgctatgaaagaagtcccctctcaggaagtggtcaaaaagtcccacatactctactgcaatggatgaagaagggaagagcatttgcatagattaaagtccaagcctccattaattcttggctctctggaagagactcccacttcctcctaataagcttcataaacacaataaaattgcattgcttatgttgttcacaaactatgcctgtacaaaatttcccatgaagaggttattacttaaaagttaatcaatgcgaatttatctttgttttcctagatcttagttgaagactcttagaaaatcctcaggtcaaggaagcctgtagatgctaagatcttattgtcattcagatcaataactagtggccaatgaaacatagcatacagtgtgttcctcctaaataacataacttggagttacattacactgaaaggtcaatacaaggagatctgggtgggggaaaatcctagagtcttgagacctctagagagtgatgctgtgagattatataaacttcctaatcctgcaggatagaagcaattaaactgtctgtggagattcagctggttatttttattgtgcacactttattaactttcttttcttctaattgatgtataatttacatagagaaatatctcactttctaatgtgtaactctagggaatctcatccaaataatagtcaggtaacatatccagagtcatctgagtcaattattcgagcttctccttgatgactttccatcctgcttccctgataactgactttatccaaataaatttttcatgccatcattacagtacccttacaagaacaaccatgattgaatactgtgggaaaactgtgcaccaaaaaaattataagactaataataaaaaatacaaacttgaggcaatgttcacattaccaaatttgactccagtgagaaaacaatttcaatattacctaagacaattgtatattaaattaataataaacatttccatggataaaagcccaggaacagatggctgcatttgtaaattcactaaaactaatacataatatttatgtatgtttattacatagaagaaaccaagtgagagtttgctatagcttctctaacaaattattattacaatgatacattttttaatctgctatgtataaaatccataaatgaaaatctcaagttttacagagcacaattctatgaaaaatcaaaactgtctccttgtgtgctctatgggacactgtttcatgatacttcagtcctagaggttggtgacattccatggctggtggtcacattattccatgttgtttcttggtctcagtatcaactccactttcatatgtggcctattatttctaactacactttataagaatttgtgtaatcttctttagaatatacacacatagtcttggaaatttctcagtctcttaaaaattaaaaatagaccccagatctctctgggcctacggctgcttacagtagacccacccagacagggaggatctccctgagtctggaaacacctcactcttccttccccctctgccaccagcccaatccctacctagtgaggagactaccaggagaggcaagaccatccagagctgcagacattgaagtcttggcccacaaacaccaccaggtgacaagaggagatagagaaacccaacatgcacccactggaagaatagatgggaagaagacagaataaaaacacactcaacaacagaaagacccatatgacaccaccagaatctagggactcaacaccagcaagatctgaaaagcccaacacagaggatgaagaagagatggacctaaaaaagtatcttaggaagataatagagacctttaaagaggaaacaagaaaatcccttaaagaaatagaagaaaaaaacaagcaaagaattatatgaaatggaggaaaagacaaaccaaagaattcagggaataaacaaatatcttaaagaatctaaagaaatccaagaaaaaacaaccaaaaaagtgaaggaagcacttgaaacagttcaaggaatgaaagctgaaatagaaacaataaagaaaacacagaatgaggggattctggaaatagaaaggctggataaatgatcaggaactaaagatgtgagtataaccaatggaattcaagagatggaagagagaatctcagttgttgaagactcgcttgaggatataccaaagaaaatctaaagtccaacaaatccctaacacaaaataagcaggaaatatggggcaccatgaaaaggctgaacctaaggataatacgtatagaagaaggtgaagatatacagctcaaaggtacaaaaaatatattcaacaaaatcatagaagaaaacttccccaatttacagtaggatatgcctatgaaagtactggaccacaaaaagaagtccccttgacacataataatcaaaacaccaaacctacagaatagagagagaatattaagagcagcaaacaaaaaggccaagtaacataaaggcagacctatcagaatcacactagaattctcaatggaaactttgaaagccagaaggtcctggatagatatcctacaaacactaagagagcatggatgccaacccaaactactgtacctagcaaaactttcaatcactataaatggagaaaacaagatattccatgacaaaaccagacttaaacaatacatatccacaaatccagcactacagaaagttctagaagaaaaactccaacccaatgaatataactacactcacaaaaacataggcaatccaattttaccaaacacagaaaaaaaaacaggagggcaaaatccacacacaatgacaccaccaacaataaatccaaaacaaacaaaaatgaacaaacaatggacattaatatccctcagtgtcaatggtcttaacatgcctataaaaagatacaggctaacagaatgggtaagtagacagaatccatccttctgctgtatacaagaaacacacctcagcttcaaagacaggcaatacctcagagtaaagggatggaaaaagattttccaattaaatgggtccaggaaacaagcttgtagcaatcctaatatctaacaaattagacttcaaactaaaatcaatcaaaagagatgaagaagggcatttaataatcatcacaggaaaagtccatcaagatgaagtctcaatcctgaacatgtatgccccaaatatgaaggcacccacatttgtaaaagaaacattactaaagctcaaacaacacataaaaccacacacacttatagtaggagacttcaacacccagctttcaccactagacaggaccaccagacagaaaattaacgaagatacaaaggatctaaaagaagttatgacccaactgggtttaacagacatctatagaacattccaaccaaacacaaaagaatataccttcttctcagcgccacatggaaccttctctaaaattgacctgagagttggcaacaacatgcagatgattgcagaagatccatttatgtcaccatgcacaaaacttaagtccaaatggaagaaagatctccacataaatccagctacactgaatcttctagaagagaaagagggagatgcccttgaacgaataggtacaggagaccgcttcctgaacattacaccagtagcacagacattgagatttacaattaataaatgggacctcctgaagctgagaagcttctgtaaggcaaaggacacagtcagtaagacaaaacgaccgcccacagaatgggaaaagatcttcaccaaccccacatctgacagagggctgatttccaaaataaaaaatgaactcaagaagctagccaccaaaacaccaaacaatgaaattaaaaagtgaggtgcataactaaatagagaattctcaacagaggaatatgaaatggctgaaagacacttaagaaaatgctcaaaatccttggccatcagagacatgcaaatcaaaacaagtctgagataccatcttacaccagccagaatggctaaaatcaaaaacaccaatgacaatctatgccagacaggatgtggagaaagaagaacacacctccattgctggtgggagtgcaaacttgtaagaccactttggaaatcagtatggcagttgctcagaaaaaaatgggaatcagtctacctcaaaatccagcaattcctctcgggcatatacccaaataatgcacatgcatacatcgaggacatatgttcaaccatgttcatagctgcattgtttgtaataaccagaacctggaagcaacctagatgcccctcaactgaagaatggatagagaaaatgtggtacatttatacactggagtactactaagtagaaaaaggcaatggaatcttgaaattcacagtcaaatgggtggaactagaagaaaccatcctgtgtgagttaacccagtcacaaaaagataaacatggtatgtacgcactcatatatgaattttagatacagagcaaagaattaccagcctacaatcctcttcaccaaagaaactaggaaataagaaagactaagagaaaaatgcatggtccccggagaatgggaaggggcaggatctcctgacctaagtgggagcatgaagataggggagagagagctggaagaatgagagaaggagaagaggagggcaaaggaggaaatggaggagcagaaatgttgagttgggggaagaatagaggacagcaggatgagagatactatatcagagggagccattgtaggtccagggagacatctggcactagcaagatttccagagatttacaatgctgacaggaactaacaatctaggacgtggtggagagtataccctaaatgcccttctcctataatgcttctgatgactactttatatgtcatcctagagccctcatccagtggctgatggaagcagaggcagacacccacagatagacactgaactgaactctggaacccagttgcagagagggaggaatgaatatcaaatgggtcagtaccaggctggtaaaagccacagaaacagatggcctgaacaagggggagcacatggaccccagactgctgtctgggaggctagcacggactgatccagaaccctctacatggatctcaatgtgaaggcctctacactctagggggcccctggtagtggatcagtatttttcctggtgtaagaagggactttgagagcccatcacacctgaagggatgctctctcagcctggacacatgggggagggcctaggcctggccaagaatgatgtggtgaactttggggaggccctgtcgagggccctaccctgcctggggagtggaagggggatgtggtgggggcaggtggcaggtggcggttggggaagaggagggagaggaagaagggattgacttgtgaagcaagattgttcctaatttaaaaaaattaaaaataactatcttacaactctctagtacttggagggcacatagagaattactgaaaggattaaaaaattaacatttgtacttttgttaagccattagtgaacctgatacagtgatttatggaaacactttacactatatataaattttttcttctgaaaccaaattacttctataattaatagtggaaggtggtgtgcaggatgcaggtagaaatgacatcaatatcattacccaagtaattaaccctgaatatgtcaataccggccttccagacaagatgaacccatgggtaaaatagtgacataaaggttttgtgggtaaccaatcacttttttttattcaatctgaggcctgatctatgggttgttagggggagggttatacttgattctgttaaccttatcaaaaaccatgactaggaaggtcatttacccctaggaaaacctaccattgatttaccaaattggtatgttgtcaaatttctttctaaatatttatttttatatccatatgtacatgctgctctcagccttggtcaaagaaccttgttttgccataggtagtgcttaatagagagtcttaaaacttcccaaaatcctgagagtaagtacccataagtactaatttaattaggtgcagcatcctcatcaactcacccacccaaagtttagtgaccatcttggaagagaagcagaaagtacatgaaagccagagcaggggagcaacaatgaaatgctctttcagacattacattggtgtcacctacatagcagctgtacttactacacaagttaaagccaagaaagttcaaacatggattcacctctgctccatggctcacagcaaccatgaagtgtatatgcttagtgtcaggggtgctgcagcaaagacactgttcttaccatttatctattctagtaaaaataaaagcatgttaaatacttccttatctgctagcatttaaattgtgcagtaaagaaatgggttatggataagccactattttggggctaggaatttgtgatgcaatgttacactttgttgaataaagctccagaatattcatataggttttatggcaggatttcccccaatgttaatggtggcatgggtttggtggaaaaccccaagaggcagcttttggtcaaaatgattgatatccaccacaaagtgttgtctctaaaattcagtaaatgtcataccaaaatttgtaacatggatgttcatgaaaccttgtgaaatgatgtattgtataagttatggattttctgtttaacaaagagagagtttatgcaaacctttgttatgacaatagaaaaatctattccaaataattttttatgtttacagtttgttttagtatgcagattaagtatgtgttaattctgaaccagataaagagtgagaagatgatatagaagaagggcaagaagggaggaagggagggagaaggaactggaattgatatgtaaaataagattgcatctaatttaaataaatattttaaaaaagaaagcagaaaaaagaagggcagacatttctggaacttgtggaagagaatgcaaacagttgttcctatgatgcttacactgtgattaatggcatcaaggagactttagaagaatcctcttttgaacctgaacctgccagaatctgaagggaagactgaaccacaagcaatgatgaaacacttagaaatttagatagtagactactactctcgattccactgaacccatttctctgccttgagaaccagcaaagtcaaacatttgaactaaaccagaaatttaacctcaggttttccatgtgtgtgagaggaaagatgttgataatgaactggtttttctctccaagaaccaaaatcacaccgaaaagttatgtaatataatgattccaacaaccagagaataattcataatccaaacaatcatcaattttccattggtaatttgcctcatgatataggtgagaggaggtggtgaaggagaaaccataatcgaaacatattgtatgaaaaaaatctattttcaattttaaaaagagtaagctaaagccaaatattaagttgttaatgaatagataacgaatagtgagaatataaaaaggtaccatccctcacgaaatgtatgctgggtaagcaaatgtctctgtggttaagaatacaattagctcttacagggtatctgagctaggttcccagcacttgtattagatggctcacaactatctagaactccagccccagagaatatgaggacctcttctggattttgcaaacacatttttagatagtgacctataattatatacataattaaaaattttggttaaaatttttcccagcataaatgggggaggggctaccaaggcttttcctgtagctgaatagctattgatagttggtgacggctgaaggggaatcatcacttttcttttgacatgtgaccactggtaagttacccatgcccaagtagatgaccccatgtttatgcatatataggcaactcatattggtctgtgcattctctttaaaaagaaagacatgaagtggagagggaaatgtgttaggtataaggtaaagttgaagcaaagagtgtgagtaaatatgataaacatgcataatatacatgcatatacattacactttcaaataatgaataaaatattatttaaaataataactatcaaatggttctaacattaaaacattgcaagcacagatgtgaatatctgtgttacactgtactactgcacaattaaagcacaaaaagtctctacatattcaagtcaaatattactaatatcaaaatacttgtacttctattgtatggtgataataagataaacctggatgtgttaatcccactgacaaagaataagaccactaccatagtttaaagccaaatttgaaacaagctttaattagacacttccagatggatggactctggccaggtccataccatgggaatcacccagaatcaagtatggcaaggacttaaaaaggaaaacccataattcattgtatttcccatcaggtatagtaagagacaaacctatatcctgacatatttcctgtctacatacctaccgcccacatatgatattacttaactctttcttattttttttggttgtgagactaggtaggctttaatggctgagacaagtctctagccctactttattcttcctttaaagattttacttcattatttttaaactatttatttatttacttatttatttttatggttgtctatacccactttttctttctttagcacatgagcacatttacaagcatgttgcaacctgttcagaggttttcttggcctggacctagcgtttgtttctggagtctctagcattctctgaccatgtgagccaaagcttaactattaggcagcagcacagccacagcgaggccctctgtggaataccagcaggagcagacatttatctccccagctctgggaagttgttgagcacattttccagagtccctgacagtaacaagtaactgctgtgcatgctctggagaggtccaggaagtgacgtggtggtgccaaatggggtgacttctatgcccaagtagtcatgtcacagattggatgccaaatatagtcagatttttcttaattatcatttacattaacttactagctttcataagactaggacctgctggtgtaaggcttacaagcaggtactaggggagcctaggtgctagcatagcccttgaaaagctggtagacagcacagccatgtgttaatggacttaagttccttttgtcagagttaaggacatggactccctttttagcaagcagcaactttgttcaatccctctgagggaatgaatgggagctttaactaaatacctgtccttggggcaaggactttatagctttgcctctgttaagtgtggtaagcctcaacaggtaggagagatatctctgagatcataagagcaagagaactatctatccctgaccctcctcagctgcagcactcaggagagtggtccctatgtcatccatggacaacaccgtagagctagcactgaaggtgtagctgtggaagatttaaccctggggacatgaaagccggggaactggtcctgctccttgcttatccctgcaaggggtaagctcaccagggtaatttaggagagctcaccctggagtttagtatttggtgctcacagacatgaccttaattattagcctttatctatttttaagtttaaatattagtaatttaaagcattttataaacttaaaatgccccacagccttataaatttaaacatttttaaaactttttctttaaaacaatctagttttctaaaattttctgtaaaactctaaaatttcctctgaaaaggtataaaatctctcaaactgtgtgttcctgcaacatttattttaccaggtgagtacccatttagtcttcaagagagagaaaacagggcataactgcaatctgcataatgcaaaaccaaactccaatagtgtaaaaaaatccaaggcttaatatctggaattcattcataaacttttgtttttctccagaggcttgcattacctcctttgcctcaccctcagcagcataaacatagcctgccttctagcgctaagcctacttcacttcatggtggctgatgcttttggtgactatcacatagcaccagcatttctaaaactgctgggctccaccgttgcaactgggctttctttagaaactctagccctgccacatatttgcaaacatcagctgttctccatgatcccttcatgttaaaacctttatcacctgggtgattcttagattacaaagtttagctgccagagaaaggtactttcttgtatacaaaacgtggagttgcagctttaatacataattaagcaaccattgtctttaaatcctaactttcataaaccttgttttcaggccaggacaggaattatcagaaaaaaattaatcctccagaataatttggaggcctgttattgcctccttggtagatccactccaaatagtctcccttaaagccacaggacatctgttttctccaaccctagcaaagacaacaaccagtcatgtggcaatccaaaagagaatcatacccatgattccttaaaaattgcccatgcatagattttttaactatcaacttccagtgctactagttttaacttttatttttcaaattttgcagatttttaagcatacccaacaaaataaacacaaatatcaaggttcagaattctcttgtaaaccgtctaaactttttgctattctactttgatttctttaccccatcattgtaccaggtggctcagactcataaaggaaacttttaattattcttaggcatagtgaatccaactctagagccacaatctatctttagacccagatttccaataaagaacaaaagcataaaataactttaatgttatcaatacccgaaagacatctgaactcctactaacctgaggccagtgaacagagtgctcagagataaattctgagccccagccataaatgcagtcatggcagcagtggtgactgactcctgttggtaccagagacagcaaaaatatctgacctatttctgtctcagctccatgtttgcaacaaaacttttggatacaccagaaaatatagatggaaactttccaacaagacaagcatactcgacttctgagagaaataggcaaaaaaaagagagattacactagaaacaaacaaaactttccaaccagagccagatgggaaggctacatattgctatatgccctggatggaagaatatttgggtcccatcaaacctcctgcacatcccagacagggatcccccagaagagagccagaccatgactcaccaggaagcctctatgaatgcttgctgcaaatcaatatggtagttcactcccatagtctgcaaactgaaggcagcctgggactcttggaacttctcaaggcatgtgccacctaaagtggcccctcaaccctggaattctggagtgaagatttagcttcagagtttgagtgggtggtctgaatatcactgggggcctcaagaaaatgttaatcccattggttgagaataaaaccactatcacagtccaaagccaaatttgaagcaaggtttaactaattactggccaggtagatggactctggccaggcccaaacccatgtgtctggggaaatggccaacaattaagtatggtgagggcataagaaggaaaatccataattcattgtatttcccatcaggtccagtcagggacaagcatatatcctgacatgtttcctgcactcataccttctgcccatatgtgatcaagcacattagtggcagatcagtcaaacatttttaggggagtgaagacatgtggcttcttatctcccataaaaaaatagcctccagaatataagaaactatgtgtccttgggatgggggcttgaagatcagaggtattttatgccatggaactctaaggcacagtagttaaaacttaaaatgtaactttggctctcacagaggcacacgtgtattttgaccatattcactcctttacccaacccttatttctctctcctctttacttctcctcctcatctccttccttttcctactctttacctctgttaagaggtgtgtgtgtgtgtgtgtgtgtgtgtgtgtgtgtgtgtgtgtgtgtgttacacatggcatcaaattctctctatatatcataggtgctttggggagaattggagggttagagtgaaaaatggatatgatccagaaacacaaaatatatgtatgagactttcaaagaataaattaaaatttaaaactaacataaaactaacaaaattcagtgtttcaattatttttaagtgcatattttagtataacagtaagagtgttcataatattgtatgtttgataaagtactgagtatattgtaaattcaattcaaaagtgtaaagattttattttgtattaacatgaaggaaatgtatcattgggatttgcaatgattttcctagtaataaaactatagacacaatgaacaaacctatattagtcagattttattactgtgaaaaatatcagagcaaatagaaaacaggagggataattttacttaaatttcaggaatttcgatgcatggacacttgaccctgtgatctcctgacctttgataagataatgagtcatagcagggtaaacctaacaggaaaatttgcttgatggcaacaaagaagcaaaggtggtggaaagggaacgtgatcccaataaccctttcaagtgtacacccctgtaacctaactcctttccatcagtctccaatctattaaaatttgcacaacttccaaaagggtccaatagcagaggatcaacacttcaatatatgagccttgcaagggaggtgtagagagtgtgggtgggaattatgacacaataatgaaaatatgaccttctgtacccatgtaccataaaacacaaacatttcaaaacaagaatttatccaaagactaacaaatatgtaatatatctaaaaaaatgaacttatcattgtaaataaccaaggtactgaaaataaaaccacacacacacactagtccaaaatatctattgttgaaagtaagagttgaccagtattggtgaggggttaaataaattagaatgcttacttactatttttggagaaaaacaaaactgctatggaaattatagcagtaactgtccaaattttggaaattgaattaccacatgtgctagtaatttctttcttatctatctccacaaatggaagtcagaatatgaattagataaataacattcttagcattttttcacaagcatcaagagggagaatgagctaaattatatcactgggttcatggctaaaggaaaattttcagctttgtcaactgtaaatacattccctatgttcaaggatcagtgttaaaaattatgtagatcaaagggaaaatgtggtagaaaatgacaaacatgctgatagttctaaagtcatagagtttaatctttttccattttttatttaaattagaaacaagattgttttacatagcaatcccagttccctctccctcctccctccactgccccttcccaactaacaccctacctatcccataccctttctgcaccccagggagagtgaggccttccatgagggatcttcagagtatcatatcctttggagaagggcctaaaccctcccccatgtgtctaggctgagagagtatccctctaagtggaattggctcccaaagtccattcatttgctagagataagtactgatctactacaagaggccctgtagatttccgaggcctcctcactgacacccatgttcctggggtctagatcagtcctatactggtttcccagctatcagatgggtaccatgagctcccccttgttcagatcagctgtttctgtgggtttcaccagcctggtctggacccctttgttcatcactcctccctatctgcaactggattccagttcagttcagtgtttagctgtgtgtgtctgcttctacttccatcagctgctggatgaagtctctaggatggcatatgagttagtcatcaatctcattatgaggagagggcatttaaggtagcctctcctctgttgcttagatggttagttggtgtcatccttgtaggtctctggacatttccctaatgcctgatttctctttaaacatctaatggctccctctattatggtatctcttatcttgctctcctctattcttcctctattctttcctccactcaaatttcctgctcccttatgtcctcctcatcccttctcttttccctttcccactctcctagctccctctttcctccccccatgctcccaatttgctcaagagatcttgtccctttccccttctccagggaaccatgcaaaatcagaatttatatttggagattaacccaagagtttggttctatatgtgttattttggagaaatcaatgaaaaatagataaaagtataaaaacagactcatctaaggatggaacatagagtacctatttacaatacaaatataggatgagtcaatgaagtgactaaggtgaccccatcttgtcctgactccattttgtttcaaagacatttcttaaccctttattctacccctggaaaagtcctatctcccttttcacacataggcctagccatagcccacatctattaactaaactaattaatgcttaaatcaaaattaattgtcatgttgtgtctaaaataactactattgtttgcctccccacaggggaaaaaaaggtttgcaaggtctctgactctgaccctcatctaacactgatgaacctatgggtattgtgggcttcaccttttaaaatgctatacacttgagctttgacacaaagagaaactgaggaattagctcttgatcactgcctaaagttaaagcactcttatattatacttgccaaaattagtctggtagtctgtacctttaattttggaggccccagtaaaattactccatacacacagaactcagcctcactccaaatatccacagccagtgttctagtaccccctgaaaacatttcaggcccttgttcctcctgggtagcctggagaggcttagaatgactgctgtgttcccagacagcaaaatggatgtgcctttctgacactcttaggaggtaagtctgcccactggattcagtttttgttaagaggacaagtttgttgaggttattcttggatactaagcagaatagacctcttggggaactttcttctttctcatgtagactatttcatcaaaatgaaaacaaacaggacaatcagagatgataaagaagtaaaaaatcagtcataaatgtgtttacaaactctttattaatgaattccaaaatttggaagcaatccaaatatatttcattacatgaacagatgtaatatagccagctaacattattcagtgctaaaaataaaagaaagatcaagtcacagaaagataaggaagaagcaattgcaaaaagaggtgaaattgatgttataaataaatttgattatttgtattatttctattgtagtccaaatatcccatgtaagcctgtacgtgttcacaacacacacacacacacacacacacacacacacacacacacacacacacacacacaccatttctcagaattttccttggcttttttcacttaggtattacattttcaaatgtattttttaatacaaaatagacttctgaagagatgtttgtattagcattgtggagcttaaatctaactaatgaacaaggaatattggagaccaataaaatttattttcaatctgaaatctcactcttacataaaacttttaccttcttaactacattcttaaatgcattgctgacttccttgttcctcaggctgtagaccaaagggttcagtgtgggtatgatcatagtgtagaacatagatgctattttatctgcatccatggaatgagtggagctgggttgtaagtacatgaaaatgacagtgctataaaatatggagactgtggtgaggtgagaggcacaggtggacaaagccttttggtgtcccctgtctgacttcatcttcaagatggtaataaatatgaaaagataggaaactaagataatcagaagagcaaagaaaacattgaaggttgacaaaaaaacaagaatcacttcactaaggtgtatatcagagcaagatagagctatgactgctggaacatcacagaaaaagtgatgaaccacattggatttaccaaaagagagactgaatatgcccccaacatgaaaaatggcattcaagaaaccacagatataacagccaatgttcaggtgaatacaaacacttgttgtcatcctggtggaataatgcaaagggttgcacactgctacatagcggtcataggccattgatgctaaaaggtaattttccccagtggcaaagcctatgaaaaagaacatctgtgcagcacaggcattataggaaactaccttggggactatgaagaactcagaaatgactgtgggagtgacagctgaggagtaacccaagtctacaacagacaggttacagaggaaaaagtacatgggtatgtggagatgagagtccataaaaaccaacaggatcatccccaggtttccaaccacatcaatgaggtaaatgagggtgaacatgataaagaggggaacctgcatgcctaggtcattggttaatcccaggaggatgaaatctcttactttggtacaattctccatcaattatctgggagccagtagatatcctacaaaaatgaaaattaaaggaaaaggagaatgataagtaaaaatatactttagtttcaaataaaaatacagtgagttatcatgccattcaagttataatggttatttaataaatatttgtgggagagagaatatagacaaaatagaactatggaggacttatgtgctgtttgtgagattgtaaattgctataggcttttgcagactactgtataggttcctcaaaatgcataaatgggggaaggagatttgtaaacagacagaggggcaatagagtaggagagagattaaagaggaatgataagaatcaaaatggactctatacatacatgacactttgaaagaaacaacttttctttctgtttatttggggggaccagacagggtttttctgtgtagccttgagtatcctgaaactcactctgaagacaagacttgccttgaattcacagagatctgcctgcatcgatctgcctcctgagtgctaggattaaaagcatgtgccaccactgctcatctcaaagaaacaactttgagtgaaagttaaatcccccttctggttatgaatacaaagtaagggtagtaactctatcaagttgtctgcatgtccatgttcattgcacaacaccttagagatgaaatcaggctagagttgatttcctcagtaaaagagtagattttaaactaagagtagattgtactgaaaacatatatgtaagtaacattacacagactgatattatacatgttacacttacatattgggggattaatataaatatatgttcattccaacaataaatggaaaaagagaacatgaatctgaaaaagagcaagaaggggaatatgggcaggtttggggaggagaaaaggaagatggaaatgatattattataatctcaaatcaaaagaaataacctttaaaagcgctttagacacactttagaatattattctgctaaagaaagaatgaaaccttgcaattttcagcaaaatggatggacttgggtctccgctgaataaaataagccagacacagaaagatgaatgcttatttgcctatggaagcttttttgaaaagttgctgtgactacaggatagtaattaactagaagctaagggaaagcagaaagaggacctagagaatggctcaataacaagcaactaaagcagtcagaagaaataagacctagagcttatatgagataaagttgttcacaataaactgctgtatcttttatgaaaaatgggaagaaatgagcttagggtgctatacttaaaacattcattagctttatccgatcaatacaactcaacatgtgtgtagacctcataaagtttacaattattacattacccatcaagttaaacagaatgggaatataaataataagtaaataaaagtgtgtatatatatatatatacatatatctatacatagtattcaattgatagttattttattaaacattttctatagttggaacacatttataatacattaatgctaattggaatcttaatatatgtaaataaaacagacaggaatgttgaaatatgtaagtatcatgtacataattatgacataaatttatacttataaattcatatatctaagaacatggttaattatctgcattgtaattatgtatcgttaatgatatgatatataaattatatagttgtttataattagtgattataattatctatgttaaaatattccacacaatatttataaataatctcagtttaattttacatgtgtataacagagatctaagtaatttattcataccaatacaaatattcactgataattcacctgttgagcccaggtattggttttcaagttcactgttattatttagatctaaatcaagttttgtcttcatagtccccaattcagctttgggtttcacaattaattaataagagatattcacaataaatgtttgaggatagtggggcagaagtgaggtgcatagccagcagaggttgtttcgaagggaagacatggcatcagttaagataaagactctgggaagaattatgttttggtccatactacctgggcaacattgctctcactccaacttaccctaaactcgcttatgccaactttaaaatgagttgtcataactaaacaacacattttaaaattacaaataaaaacttcaactagagctaggtataatatttgtaattatgatgtttgtgttaaattgataatatgtatggttatatgtgtgaatacattctggaagtcttgtcctctgtaatttgactattgttcttatcattgctgtggggggggcgcaaaaacactcttacacataaaatagagtttttaaagaataaagaatcatattgtcaatattaattaatttttaggatattttgttctacaactaatattaaaatcttctcacatgactgccatgtgtcttgcaagtattattaacaactatagagattaattttttgaagttttgtgatagtctataattaccaactactgtggaaattcctaaagactcaagatggaacccagttttaagcgaatgggtagccaggtgtccagccaccttgttattggtctatttggatgtgaagttatttacagctaagttatgagtaaagcactgaaattcagctgagttcttgctaacttatttaatgctctctgtaaattttttgaacgccaatttacatgtctgttacttttgtctgtgttgtcccataaggaggtttggtaatggacaagataaaaatccaagctgtataatagtatttcccttcacatttgtgttcatcatcttagggaagctgtatgacattttgtaagaatcattaccctcaccattaacaagtgttctaacacccaacccccaaaatcagtgtattgctttagaaatggaaaaaaaaatgccaacaactagttcagtgttcagacaactttttatatgcacctatctctttgattttacatgttttaaacttttcacttaactatgcgcacaaccttatatatgccaatcatacctccatagagtgatttttgtaagtatttttttaaggtttggaaagttagctcagtaaagtattagccttgcaagaatgaggacctgaattcactctcaaaaacctaggctaaaaaggtaagaaaggagcatgcacttctacctacaaagctagggttggagacagaccactgccgcttactgggaggccagttttgcctgcttagaaagttccccagggaaatgagagacactctctcaagaatagatgaatggaagaatggatggatgcacaaggcagataatgacacccaaagtggttctctggcctctacatatgcttactggcactttcgcacacagattaaaaaaaaaaagtatttctgaaagttttatatacaacagatagaagtttaactcgcctctgcataagaaaatatatttaatcctaagtaaaatgtctgaaatcatcaattcaatcaggtaatgaataactgcttacagaatacttaaatgatccttgtctccacaacaagaaaaaaatagaaggaaaaaatattaaccttggaccacatacctgggttcaagtcttgaatgtagcatttattcttacagtacccttgaactgatcacttactctttatttgaaaactaagcaaaataaccctccaacataatttgcagaatcatatcagtaaatagaaatttttacttaatttgaataaaaggtctgaaactctgggttttagaagtctgaaactttgtcatggaagaatgtgtatatgtggagatggaaagatgcctcaatggctaagagctttggctattccataggacccatgttcaaattccagaacccacatggtggatcacaactatctgcaattccagttctaaaagattcaatacccccttctggactctttgggcactgcatgcatgtgacatccatgcaggctaaagcacccacacacatgaaatataaagaataaaaaagtttacaaaaaaggggcaaattattttggaggtgtcatcttttggaaatatcttccaaatgtcacttaccttactccaacttcagattctttattcatgggcaaagtatatcataaacacagaattatgtctctgaagagcaaataaaatcagtctgacaaaacagttgttactgtaaactcattaagtataattatgagttggagtgtgttctgtccatgttcactgtctaacaaaatcctcagttggagggaggctttcctatgctcactctcccatttagaagcataaataaagtaatgatgtgtctgtcgaacatctctgctaaaaattatgtcagacagaacatcatactgggatttacagaccaatgaaggggacccagagggagttgtagaaacatgaagacatcagggaaataggctccctatgaggcaaccatggggccttactctatttctttaagtagaagcaattaaactgcctttgggacctaactttatgactgcacaagcatacagatgcacctatgcttttctctcatttatgtttcccattaaggaaacgtataatatatagataaatgtatattatcacataccagtaccaaattcaactaaatatatcagttcaaaagacactttggtttatttgtaataaatcagttttccacctatcatcagctcccaaaatatactggcttcatccttgaatgttttctttcacaaaaatataaaacatattaatgacattttacaatatctagcatccaaagtgtggattattttctttaccctagtgtatgtgtttcatgaatgagtacttcatttctttttattattaaatggtatctaaaatgtgcaactacccagattatttactgataaatgaatatatatatataatatatgtggttaattaaaattattctttggaatatatatatatatatatatatatatatatataatcacattttttatcactctcatcccatcaagccccatcctcccaccaagtcactatcctatacttacatattcttggtttgtttcattacccaccaactttaactaagagcatctatataaccatggaattggaacgtggtaagttaaccagcagttaaacaactgaagacacttttatccctcctccagtagccaagctatttcataatactgagtatgctatgagagttgccaatatttttacatagataatgacttgcatttggcttgaataaatgcaaagaaacaagatcatcagtaaacttgctaaacttttctttagtgctataaaacattgccaaaaactgtttttaaaagtgttatatcagattgtgtttccctggtaataaatgataaatgcaatttcctcctaccattgccaactcatcccattatatgaaaagctagaaaaagtgtattggtgacaaagataaagccttcagtaaaggctttgaggagtatatggatttttgacatttgcataaatatgttttttttacaaattattttctagataagaaccaaacatagcaaaataaaacataatgaaaggaagcaaaagccatcccattaaagttggggaaggcaaatcaacaaaaataaatgacccccaataaaatgtagatgaatgggatacctacatgttcacatactcaggagtcccataaaagagctaagcttagagctaaaatatactatgtgcagtggccagacccatatatgctgtgtgcttggtgcttcagtctctgtgagttcatatgccccttgatcagttgatttagaggaaactgttctgctgtcctttaagccctcttcctcttcgactctccatctcatcttcctcaagatttcttaagctctgatgagagggatttggtggagacactgcgtttagagctatgtgctccagggtttgtctctctgcatattgtctagctgtgtgtctctgtgtttatttccaactgctgcagaaggaagcttctgtgatgatggctgaataaggctctgacctatgagtataccagaatatggttaggagtcattttattgtttcttagattttttttaagaacagtagtactgggttttactttaaatctctggactatctaatctatgattcctggtcatccaagcagtgtcagatatacattccttcatgttgagtggacattaaatcaaggcagacatttttagttattccaataagttctgtgccactgctgccctagcatattttgtaggcaagacagattgtagattcaagattgcatggctgggttggtgtttatgtttctttttggtagccttcagagtaccatcccatacaaagcacactagaacataggagtgagggttccatttaggtggaagtttggtctctccctgttcaatgagttctgtgagtgtttccctaagcaatgggtccttgctgtcagtttgaagagagtacctattatcttgaaataacctaagttatttgggggtttccatgagacccctttggacataactcattgcatttaacaagtactggaagcattgtttggtgacaagagatggccagttggagcccaatctcccccattataatgagacttcattgggagtaaattcatgtattttaggaagtttccactgcactaggtttccacactacccgtcaagtatgtctcttcctgcatccatctgtcaaatcacactcctccccctaaccctagtgttaagatatcataacaccccagtacacagtccacctataaatctattctatttctcgctgccagggagatccgtgtgcactcccaagtcccttcctctatacctaacctctctgggtcaacagattgtaggttggttattatttatttaatgactaatatccacatatatgcaaatacataacatattttctttctgggtctgagttacctcagtgagaatgatgttttactattttcatccatttgccttcaaatttcatgatgccatagttttaacaatcaagtaatactgcattgtggaaatttaccacattttctttatctattcctccgttgagtaacatctcggattgtttcaattttctggtaattatgagtagagcagcagtaaacatgtttgagcaagtgtccttgtggtggaatgaaggatccttagagtatatgcccaagagtagtataactgaatctagaggtagatcaactcccatctttctgaggaattgaagtactgattcacatagtggctgtataagtttttactcccaccagcaaccaatgaggataagtgttctcattgttccatatcctcacaagcatgagttgtcacttgtgttattgattttagccattctgacaggtgcaacttggaatctcaaagtaatttttgatttgtattttcctggtggctaaggatgctgatcatttctttaagtttttctcatccatttgagtttcctctatcgagatttctctatttagatctgtatcctatatttaattaggtcctttaggttttggatgtttagtttcttaagttctttatatgttttggatattagacctctaactaagataggattgataaaaatctttcccattcgataggctactactttgaataacagtgtcctttgtcttacagaacttttccattccatggggctccatttattaattgttgattgtaatacgtgtgctatcagtgttgggttaagaaagttgtatcctgtgccaatgaaattaaggttattccccactttctcttctagcaattttcgtatagctaattttatgttgaggtctttgatctacttcatgagtttggtgcctggatctaactatctgtctgtttgtattgcttatttgatcttgatttaattttggtaagtggtacctatcaagaaaataatccaattcttttagatttttaaatttggtcgagttcagcattttaagttatgtccttataattctctgcatttcctcagggtctattattatatcactttttcatttttattttgttaatctttatttggatactatatatctgagttttagttaatttggataaggctttgttgatcttgttgattttctcaagaatcaactttttgtttcattgatctttgtcttgttctcttaacctctgagccatctctccagcccttgtctcgttccctttgtttcaacttttatttatgtcagccctgtgtttgattatttatttccaacttcgttctcgggtttgcttacttctttttgttctagagatttcaagttttctatatgggatctctccagtttttttttttttttaatggaggcacttagtgttataaactttcctatttgaactgttttcattgtgtcctataaatttggatgttcgagcatgcattttcattcaattcattcattcaattttagaaggtccttaacttctttatttctgtcttggctcattttgcattcagtagagacttgttccattttcttgcgtttgtaagctttctgttgttgctgatatctggttttaatccattgtggtctgataggattcggggtgctatttcttgtatctgctgagactagctttgtttctgagtagatggtcaattttgaagagaattgcatgaggtgcaaagaagagaagctatatccatttatgtctgggtaaaattttctgtaaatatccattaggtacatttggtttataatgtttgttatatccaacagatctctgtttagtttttgtctggatgaactgtttcctggtgatagtggagtactgaagtccaccactgtcaatgtgtgacttaatatataacttaatttatggtactgattcctctatagacttggatgcccttttgtttggggcatagatattaagaagtgaaatgtcctcttgattgctttttcctttggtgaatatgaagtgtcctctgtcttttttgattaactttgactagaattctattttgttagatgttaaaatgagtacacaagccttttattcttatgtccagttgattaaaatatttttctagccctttaccctgaggtaatgtttatccttgatgttgaggtgtgttttttatgtactacaaaaggatggatcctgttttcacatccattctgttagtctatgtctttttattgtggagttaataatacagatattgagagatgtcaaaaactaatgattgttaattcctgttatgttattattggtggtggtggtggtgtgtgtgtgtgtgtgtgtgtgtgtgtgtgtgtgtgtgtgtgtgttccttctgaggttgtttattctctctgttttcaggatggtagttaactcttctttgttgtatatattcagtgctttgattattatgtgcagtgaggaatttttttttctggtccaatctaattgatgccctatatgtttcttgtacctttataggcatctccttctttgcattagaaaatttttcttctatgattttgttaaaaatattttctgagcctttgatctgtgtttcttcttacactattcctgttatttttagatgtttgtcttttcatagtgtccaagatttcctgggtgttttctgtcaggaatttataacagttctaactgtttctttgactcatttatccatttcttctatcatatcttcaaagcctgagaatctctcttccatctcttatattctgttggtaaagtttggttctgtagttcctgttcaaatacctaaatttttcatttctagaattccctcagtttgggtttatttattctaattctactttcagttcttgaacagttttattcatttttcccactgcttgagttttccagctttaccttaaggaatttattgacttcctctttaagcacctcaaccatcattattcatatagttttaaggtctttgcttgtgcttcagatctgttggaatattcagttcctgtttcagtaaggtagctgagctctagtggagaaatattgacctcactgttactggttgggtttttatactgtcatctagccatctagaatctggatgatcatatgtctagacactgattactggatttgtctttgttggatgcatttttttttctttcttggtttctgtttcctctctggattttaggagaatttggtggctgtgagtttcctgataggaaatttcctgtgtacctaataggtgtcatcactgggggttccaggtaaaatgtgtttctgtgtactgggagataccatttaggagtggaaatagatagagttctgaaggggttcacaagagggaggagaggagaatgttcaagcaggatctgcttattatgtctccttggaatacacgatatggttaaaaaaagaggtcaccccatgtctgctatagcactgaggattaaatggggaaattggatctaaattacagctcctctagattcaggaagaacagaaggagaaagaaacatctacagacagcctacagacttccctgctagtagtggcctgtttgttagcagctgttgtctgctggagatgtggcctgagataaagcaaccagtgtggaaagaaaagttaagaggagaagatcttagggatccactggagatgtaggcaggggagagaaggaaggctcaataggtgttctgtttcagagctatggggtgggtttggagagagggagagtggttaatgtcttcagttggcttccctctcttcctgacttgattgcctactgtgttcatagagaatgcctgctggtgttggaggctgggatacttgctcccaggcaagaagtggcttgtaagttaagaaagagtgcctgctggagttgggccacttttctggcctgcttggctggtgtgttcacaaggaatgcctgctgctgttggaggctggaatactggaatgatttgaagaggggatagatgtcacttaaggtaattgaaacaatccattggccttagtgaaaaacttaagagtaaagttatgaatgccttatgctgtgatactcttttagaaaataaagcaaccagtaaaaaaaatagtgtatttatttaattatacagatttatttgtttttaaaatacaaaaatcaaacaatatcagcatagataagttcttacatccccaagaggttatttctgtactattaaaaacatctaagatacagaatcagcctagatactgatcattggataaattcacctttaacatgaaatatataaacacgtggaatattattatactccccaaaattatgctttgatataatttgcatcaaagctgataaatcctgaaaccatcatgttaagagaaataaaatcaggaacacaaatactacagtgtcttccatatgtaagcgttaaataataaactgactgctaaaggcttaaaagaagtaataagttctagtactcctctgtaacacagtatgaagactacaactcaccattacactatatgactccaaaaaccaaagctatagaagaaaagaacattagttaccctgactgggtaattacacacttggctatatgtttttaatatcacagtaaactataaatacatcataattattctataataacaaaaatattttaggaggtcacaaaatatttcacagacattgaaactgagttggcgatgtgtccctgtggctctaccaggctgcatttgccttttgtagaacataggtcagggatcttggggacagacctgatttcttcgctctgctaagccagggtaaattcagtccagccttttgcacctagtctgcctctgtagtgatttcatgcctcaccttcaatgctgtttaaaatatctatagtagtttgactgaaaaatgttcctcacaggctcatgtatctaaacacttgcaggagtgcagctgtttcaggaaatttctgggaccattaagagatatagccttgatgaggtatgtcactaaggtggacttggaggctttgtagccttgccctacttcttattcactctctttgattccactatgtggttgaaatatgatcaaccatcttgctcctgccacatgctgccatgccttcctcaccataagggaccttcagtctggcgccataaacaaaataaatctttcttctataagctgtttttgtcatggtatttcattttttcacaagaaaagaaaccaagaaaatgtattttgaaattgaagtgaccatagctgtgtctacccagctcttgcagtattagcttcctgtggatgccaccattgttctttctataactgtacttgcaaaatcactggtgtgagcttgaattgggattgataagtaataggcatcctatcaggatgcaaaaagcagagacatttgtgttctctaggcagcacagtccaaggtctcacaggcaccatatgccgttatctcaaaactgtacaggaggtcctggatctttgatggatagaacagcctctccaaatgcttttgggataattatctcattgttttgctgcatgtcatttggctttcttgtatactgtctttattttatggtctgtgggccacactattggttttatttctaaatataatttttactctttaaatatttctggactcagaaatatcagatctttacattctctatagtgaacacttagtgatctgttgtgacacatattccagtataggttcaaaacccttacaaaatcataccacattctgttagtttacctttccacctattacgtgaggacagggtgaccctatcagaggatgcatttctcccccaaacaacttaaccagctggtaccttgatcttgaaattagcttgcaaaactaaaagaaaaggtatttatttatttgatatttatcacccagttttgggtgctcatgtatagcctagacagaaattgttggtatagaagtacaacactattatatttcaaatacacaaaagtgtaaacatgattttttaagtaaattataagtagaagttgaatcatatttgatctgaatggcaaccacagccttgatcttatgaatggaattttcagggtaattctggtgcacattcaggagataagggtagtagaatctcagtcttctaagaactacctgagtattcatggtcaaaatgcttgtaactacacataaacagaaaatcaaaggcagttcttgtggtgttcaaaaaagaaataagaaatatcttgataggaactagaagaaaggttacccttgttatacaatggtgaagaacttggctgaatcacatttttccttgtgactctaaagaaaccataattaaacaataatatactgaaatctgtgcatgcctgtgtacttgcatgtttgcatgtgtgaatgcacatacacataagaaggcccaatgttgacatcggcagcttcctaagtgaccttccactgaaaccagagttaataaataaggctgttccagggattttctgtctccatataccataaacccatatactttgggtttacaggatgtttgctatccccacctggcatttgcacgtctaatgaacaccagtctttccactttctaggcaactgtttacctgcggagctccctagtcctaaacctaacctcctactgagagagttctctaggaattaaatactatttttatgttgataactctcaaatgtatttcatcatttcagttctaactttgttctgggatatccaagagaaccttcaggtttaaatgcccaaaatgaagttcattacctccttctgttgctaatcttatactattatgatctttctcatccaatacagaatatatttactgtcctacttatttaagcaattggatcactattttttcatacttgcatccaatgcaatatttacttttcaaaaatatttaaataacctataatggcaatataaaatattgtgtccatttcatttataatttcatttatggccactgtttctcagttgatttttgtctacacagcctgtatgttagtgaaagtagggtatagaattttactgatattactgaattaatgttaatctctagactaataactagtattggatatatccaagtttgagtgtatatattgagaattataatttcctattgatgaattgttcatttggtcaaaatgaagttacagtctttatcacttgtgattaattttgacaagaagttagaaatcaagattttgtgatatttagatgatgtaggagattcaaacagaaattatatcaatatatttgtttaatgaaacacatatttctgagatttatataaattaaaggacaaaggtaaaagaacttagttgattattagaaataggaaatggtgagaatgatgaagaatgtgttaaagaagttactcaaagtctagtaaaaacaaaaaataacaagtttggtagttcagattcagatatcacttgtcagactgtttactaccaaactattttttctcttctagaatattttaatttcagcaagacattcgattccaatagcaattggtcacaactatgagactaaattctgcatagaagactttgctcagtagcagtgtgtatgaccagtccctgaatttctaaagaagacattgatcatctctttttatttttttctccatgaaagaactatagaaatgaagaagggagtcttttaatactctatgagatggcagaaaaagacagtgggaatagacattcataccagcatagtatttaaaacatagcagtctagaaagttcatttttacagtttaacctgaactactgctatttgggaaatgatatctgtatatggcttcacattttgttacttttaaataatgtttttatcaattctttgttatttttatatgatatatttgacacccctcccccaactcaactcataattatcctctcatcctttcccaccaaatgttgagttttatttttctatctcctaatgtataaaatcaaatgtgtgcccccccaaataatcttgtgagtaggacctgttgtggtgtgtagttgatcttcccatggtcacaacactaaagaaagcacattttccttccccccagaagttgctaaataccaatagttcctcagctagtgatgggatttcatgtccacttcctcactctatgctggtatttttcttgcttgatcttgtgcagatcttgtgcttgctgtcacaatcattaagagtgaatattataaatgccatgctgtgtccagaaaaacactggtcccttgatgtggtctatcagccctgcctcatacaatctcccagtcctctctttcacaaaatttcttgaggcctgggaagaagagtctgatatgtatgtcccaattaagactgagaactccagagcatcttattctctgcacactgaacatattttgtattctttagcagactagtattattgttccacaatagttctgatctagtgaaactctaatcacttcacaatgacaaactcttctcacacccccttctcaaaattactatttccttctttgtatttgaaacttggtgagacctaactgcaatgtcctggtatagagtgatggaggaaatgcatgcatgttttacataagatttgaataagcctatgagttacataacagtctctgagaatactgcctaaaaatttaaatatgacggctgtattatgttccaaaggataagagattaagggcagataaacaaagattgcctagaaaatagccagtattgttaataataaaataaaatgagactatcttagaacaccaagctcaactgaagttacaaaacatacaaaatctcatgagtgagcacagactcaaagcaaaggagcttctctgtcctgagagctatgtagagtaaaccattacctggagtcaataaatgagagaattatctgctacacaatagataaatgattaattgtgcaaactgcataaatctgtaactaaagctaggtgttgaacagacttcatcttctcagtggctttctttaaggcattatgaacctctttattccttaagctatagactactgggttcaacatgggaactactgtggtgtagaacacagatgccatttggtcattgtccagggaatgactagaactgggctgtagatacataaagattatagttccatagaatatggtcacagcagtgaggtgggatgcacaagtagagaaggctttcttccgtccttctgctgaacgcatcctcagaatagcaatgaatatgaatgcataggaggtcaatataactatcagagcaaaaaacacattgaaggacgttatgataaagagcacaacttcattcatgtatatgtcagagcaggaaagatccaggattggaggaatatcacagaaaaagtgatgaatcacattagaatggcagaaggagagatcaaagataaatccaatatagatagatgattctgctaagctgaacacatagcatccaatcaccatgtaagtacacacactagcagtcatggtagtagcataatgtaagggcttacaaactgcagcatgcctgtcaaaagccatggcagcaagtagaaaacagtcaacactggcaaaagacacaaagaagaacatttgagcaacacatcccccataggagataaccttatcccctgtgagaagcccagccatcacctttggagtcacagctgaggagtaaacacagtctgccagagagaggttactgaggaaaagatacataggagtgtggagacgggagtccagccagatcaacacaatcatgcccaagttcccaatcagtgtgatgagatagatgagggtgaatgttatgaacagggggacttccagcttggggttgttagtcagtcccaaaagtataaaggaactcagtctactgctgctattggccatgaacatcattttgatattgttttttttttacctgtcaaaatcaaaaaaagaactttaacagattgctgaagtatgactttcccagagtgcatgaggccctgaggccctgggttcagtccacaaaggtaaacacatgatgagcagggaagaaaacagtgtaatgaatcataggtttaaatagcttggaattctgcttaatgaatagttaatacacaatgaacaacatatatatatatatatatatataatatatataatatatttggtaataacaacagtgatgtatgcttatgttattggaagagataaaatgagacagaaaaaattatttgaaccctatcactcaagcagcttatatagataattgtctaactttaattcaaatttgcttaggtaaaataaaactttcataagtattaaatgctaacaagtatgatgtctcagaaggaataacaaacaggaattttcaaatgccatcttgtgctacagcataatctgattaaattcagatttgacgacttaccttatttgataacataatctcattataaaatagccccttagtttataaaatcgtggtaactatctgctgaaaatatgataagccttcagcaaacaagaatttaataccagaataattcagctttgggtatcttgctctcttgctcctcatgcaatccatgagcatggttaatgctgtctccagcttataccctcaatgtattcttcagtcactagccccagaagagccactaccatttgggtcatagctgaaaagaactgagacatcaagttagttcataggaaagatggaacaagaaaagctcatgtgatctgcaaataactgatcttaaagatggtagggctgatgaataaatattgaagtttttcttttcaaacagaaagcatatttgtgcagactacatttttcaattatttattacctctcttataatttcacatgtggatgtatgtaattcattcctattattctctcctgtcactgtttcttatcttcttttggcagtgcttaacccttcctcctctctatgttttcctttcccagattaatgacattttggggggagggcctcaaacttcaagctgaatattagaaaagcaaagcactgccactagcttcttacctctacctcaagctgaatgggctgatcctgtctccacgagctctccccaagcctcagacagtaacctctcctctggagaaagactgtctcatactgctactgtaggccctgcttctaccttttataatccctagtgctgggattaaaggtgtgtgttccgttactattttagactgattcaacctcctgcatcttttgtggccttgaactcagagagatctgtctacctttttttcctgagtcctcatgacttttaattttgttttgtgactcagggccatgttagtgactactggattaggggctatccattgtaacatactgcagtttccaggggatacacactgaaggcaaattatatcccttttccaaatccagcactaccagttcaacaatgaagggtaagtaaggtcacataaccattcttctagccattactagttgttaatgggtgcattctttgtaacactaaacataacattggcaacagtattcttggtgccagacactgttgtgctaagtcttattgattcacatataaacctcctaaaaatgaacatgagaaccgaaacaataaattttgctgttataaagttatttctctgtgactcgttatacttagaatagagctaaacacataaaaaaaacaccattctatctgggaagcaaaaacaaggagactgtgagttgactcctacctgggtaaaagattgagttcaaggccagcatgagtaactgcatgactttgtctaaacctgaaaagataaacataaataagaacaatgtgtgggagcagagcatgctggtaaggagtttgtctgctatgaataaaaccctgtgttcatttcccagcaccataaaacaataaatagatattgacaaaagtaaacatggagagagaatagagaaacaaacaaaggtacagaatgatgaagaattatggaaatttaaaccaatgtgagatagcaaaaagtacctgagctttgggatatatacctcattttgaaacttgggtttcaaacttaagtaaatttttatttaataagatctaaattctctagagatttttttcctctgaaaaaagtgaagatatgagatgcttcataatttttgaataaacttattcccatacaattgagtatttgctgtatactagattaaaaccagagaagcctctttagattttttctaatgtttatgtgtgtatcctgtcatacagcatgcaccacactggcagtcattttaggtgaataaactacctaagaaatatttgtaattcctctgcaaaaacagtgatataagagcagctcccactaagaatttaaacatctctaatgttgtctgctctgagactgcacatgaagaatccaagtagaaaacacttctcacactttttgttgatatgttcatgataatatattcttacaatttatatcttacattatgttccatatagatagtgtccatgtctttctttaagaattctctcaaagctgggcttcggtggtgcacgcctttaatcccagcactcgggaggcagaggcaggcagatctctgtgagttcgagaccagcctggtcaacagagagagttccaggacagcctccaaagctacacagagaaacactgtatcgaaaatccaaaaaaaaaaaaaaaagaattctctcaaaatacactctaattttttgaaattatattatgcttatacttttttgaaacataactgacaatagtcagtgaaatagcatttaaatataattgaaataaatttaatgtgatacatgtgttattaaaatgcactgtactctccatgaatttgcctaatgtgaacctttgagaattaagctatgacaggttgttcacagtattttataaatagaaagttgtaatctattagagatggtaatggattaataatgaattaaacaagcaatttttaaaacttgtgttaaataccactactattattggtaatgactttctttttgtctttttgttttgtttttcaagataggattttcctttgtaatagtcctgactgtcctggaactccctttgtagaccatgctggcctcagactcatagagatccacctgcctatacctcctgagtgctattttaaggcatgcactacactaccaccgaccggctagtaatggtttctaacagagattttatgctactgttctgcttaatgttcgcaaatattaatttatttaagacaaaaaggagcataaagatgaatcgcaaagtggaagctttatttcatattctatgaatatatccatgttgggatagatagatagatagatagattgattgatgtattttctgtttctcaatataaattgtacttatagctataaattccatattcccagaacacttgatcatgagcctataaaaagttcatgtaaagttctctacaaatattgctttaggaacacatgctaaataacctaacaaaaaggtaagtggttattcatagatagacttcattcagtccttcatttgtttgcttagtgtgtccaaactcacttactgagcttgctctattttataaacactatcttaaaacagatttcaaagtgtgataatgatgtcatcttctatttggaaatatccccatttcctccattagatacagaaggcagttgtgatttctagactcctggtttttaaaaaggtatgaaaacaggacactagatgccataatactgaactctgatgtttacataggaaaatagttaccctgtacctttacaaagaagatcttttatttctgcagtctgaacaaaacataaaacccaccttgttctttaaagaaagtggctctgtgtcacttggaatccagttggaagtccctctcaaataaggaaagctcctggtgaagaagttgtttcctaatgactagttgaacaatgaggttctccagagacagacagatacaagaaaatgtgattattatgaggaggttacaaaatagtctccaacctgtcacatagggatgctgagagtaaaaacacaagaaagtctctgatttcagtctgtgaagttgtcagcaactttaagaggaaagagcacacgattgtgagctcagatataaactttaattggacatttgtttgaactggataataatatgtaagtgtgaaataaaagttcacaaaatagcagatttctatatttcaataaacaccaaaatgcctttggcacacaaaatgttccttctaaattgatcttatagattcatcctggatgctagacatgaatgtcttgaattcaaaggacttatacatgcataaagtccacagagaaataggtgcccaggaggacatccacaagttttcactctattcacctacagaagcagtaattaaacagtctatagagacttacctatatcagcttgttgaggaagaacagtcatccattacattgcctggaatcatgtgtgtgtgtgtgtgtgtgtgtgtgtgtgtgtgtgtgtgtgtgtgtgagagagagagagagagagagagagagagagagagagagtttgtgtgtgtgagagagagttctttattttgtagctgcatcatacaaatgaaatagtccctcttagagaaagtggggaagttcattagatttgggaagctaacaaaacttacaaagcttagaaagttaccaaagcatgagtccccaaccctagtttatataagcatctggcaaaggcatggggaagagagacttgtagctccctgcaagttgtattcagcttttttgtcttcaaccatacttgattaaattccagtcatgcacttccctttagtatctcacgaatgtctactataagtaatctctcatggagctcctataagggcatagattttgaaagaagtattttttgtctcttgttggcaccctctctctctctttttaatgatttttattcttttttgcatactgactacagtttctcctccttccactcctcccagtccctcctccaaccacccctatacccaatcatccactccttctctactcctattcagaaaagggcaggcaacatgagatatcaaccaaacatggtatatcaatttgcagaaagactaggcacctccccttgtattaagactggacaagacaacccaatatgaggaacagagtcccaaaagccaacatagtagtcaaagtctatcactgttcccactgttaggaatctcacaaaagtatcaagctacaaacctgtaacatatatacagagtgcccagatcagtttcatgtagctccctacttagttcagtctctatgagtccctatgagcctgggttagtttatcctgttggttttcttgtggtatcctggatccctctggctcctacagtctttctttctcctcttctttagggttcactgagttccatctaatgtttggctgtgggtctctgcatttgtttccatcagttactggatgaagtctctctgatgaaaatggggctactgtgacttttcttggatgaaaagatgttcattcatgtatctctaagaaaaactcatgcacatgagtctacgtttattcaatcaaaatattttacttaatacttctttgaactatatcttaactatttcagaaaaattaaactgaaaatagaatcatttcaaactattggtggggatataattagtgtgtccactaatgtaggggaaaatgctggccatgcccacttgagggctgacacaggtaatgctgtccactcacaccttggcgtgatcagagtgatgtagcaaggctttaaacattagggtcgcatgcatgtgagtctctattccctctcccactggttctacaggactggctctcttgcatgattacaccctattaagccatgtgtttttcaaactagctctgactccattgcgatctgcattaattgcattccacattacctggtgtcagaagtgggaggtccttctatgtatatgtttatcttatttgatgataaataaagcaatgttggccaatagagaagcaagataggtggtactaggagtcaaggaagattctgggaaatgtaatagagacagtcgtcgacatgtaatcctgagaagaatggacatatgctgccagtgtcctcagtcatttaagtcttataaatatatagattaatatttatggttgatgattaaagctgattgatctagaagataagaaatcaaagtcattgtccagcagcattgtacctaatatgagattctgtgggttattgggggtcctaatgttactgtgcaactcaagcagctggcggaaagacttattgttacacactaataggggaattcttttttttcatttttcatttaaattctttaattactacccatatttacatgtctgtcccccattccctcaccctcccatcctcccatgttccccaccaaacccccaaccaatccccaatctcctccccaaagatagtgaggccctccaccagcgaccttcaaagtctgtcatatcatttgggagagggtctaggccctccttgctgtatctgggatgaaatagtatccctccatagggaatggactcccaaagtccatttgtgctctagggttaaagactggctccactgttagaggtcccatagactgtcttggcctcctagcaggcatccacattcagagggcttggtttggtctaatgctgtttctaaggtctagggtctccatgctatcactaagtcaggtcaaatgtttctgcaggtttcttcagcactgtcttggctactttgctcatccctcctccatcaccacaattggattccaggagtatggttcagtgcttagctgtgggtgcctgtttcttctttgaacagctactggatgaaggctctaggaatggtaaccaaggtagaaaacaatctcattataggggaagggaatcaatagcattttcttcaccactgtgtggattcttagttgggatcatccctgtgggtcccctaacatttcccctgtgccagacctctctccattgctgtattgtctccctctatgaagacatgtcctttcttgccctcctctatttctcccctctctcaggcctcttgttctccttccctctccccatcttccctcctgacctccttcctctccaaccatgcccaatgctcccactttgttcatgggctcttgtccccctccctttcttcgaggtagtatgcaatcttctcttgggctccttcttgtttcctagttcctctggcagtgtggattgtagactggtaatcctttgctctatgtctaaaaatcatatatgagtgagtacataccatgattatcttttgtgactgccatattgatttccaatgtggttgtacaagtttgcactcccaccatcaattgaggagtgttcctctttctccacatcctctccagcataaactgtcattggtgtttttgattttagccattcttacaggagtaagatggtatctcagaattgttttgagctgcctttccctgatggctaaggatcttgagcactttatcaagtgtctttcagccattttagattcctctgttgagaattctctatttagttgtgcattacactttttaattgcattgtttggtgttttggtggctagcttcttgagttcattgtatattttggtgatcagccctgtcagatgtgggggtagtgaatatcttttcccatcctattgcctggagttttgtcttgctgactgtgtcctctgccttacagaagcttctcagtttcaggagatcccatttattaattgttgatctcaatgattgtgctactggcattatgttcagaaagcagtctcctgtactaatttgtttgagggtaccacctaccttctcttctaggaggttcagtgtggctgaatttattttgaggtccttgatccattgggatttaagttttgtgcatggcaatagatatggatctatctgcaatcttctacatgtcccaatccagttatgccaaaaccatttgttgaaaatactttctttttccatcgtataaactttagcttctttgtcaaatatcaggtgttcatatgtgtgtgggttaatatcagggttttcaatttgattctattggtcaacctgtctattttttgtgccaataccaagctgttttcaggactatggctctataatagagcttgaagtcagagatggtgatgcttctggaagtttctttattgtacagggttgttttggctatccagtgtcttttgtttttttttcatatgaagttgaagactgttctttaaaggtctgtgaagaattgtgttgggatttaatgggaattgcattgaaactgtagatttcttttggcaagattgccatttttactatgttgaccctacctagacaagagcatgggagatctttccattttctggtatattcttttttatatatgtgttttatatatatttatatatatttttattaattcaagttagggaacaggcttgtttcacatgtaagtcccttctccctctcccttccctcacccccatccctcctcccccacctccaacctactccccaccccatccacctaccactcccgaggtagggtagggccctcaacaggtgctctgcaaagtccaccaaatcttcctgtgctgggcctaggcccttccccatgtgtcctgagccagagtgtatcccttcaagtgggatgggctctcaaagtcccttcttacaccagggaaaagtgctagtccacttctagaggctccctggattacaggggcctccttattggcatccatgttcaggggcctgaatcagtcttgtactagcctcccagatagcatctggggtcgatatgctttcccttgttcaggccaactgtttctgtgggtttctccaacctggtacagaccccttagatcttcattccaccctctcttcaactaggtttcagatttcagctcagtgtttttctgtggatgtctgtctctgcttccatcagccactggatgaggactctaggatagcatagagagtagtcatcaatctcattctaggggaagggcttctaggccatcctctcctccactgcccagactgtcagattgtgtcatccttgtaggtctctggagatctccctggttccagatctcttctcgaacctatagtggctccctctgatatggtatctctcatcctgctctctctcctctattcttcccccaactcaatatctctgctcctccatttactctcctctactcttcttcttgtgctcttattgtggcagcaccctctcccctaccctcatgctctcaattagctcaggagttcatgccactccccattcctggggtctatttatcccttagaacccttcatgatttctagtttctttggtgaagaggattataggctggtaaacctttgctctatgtctaaaaatcatatatgaatgagtacataccatgtttgtctttttgtgattgggttacctcactcaggatggtttcttctagttccatccatttgcctgtgaatttcaagattccattgcttttttctgctgagtagtactccattgtataaatgtaccacattttctctttccattcttcagttgaggggcatctagttgcttccaggttctgtctattacaaacaatgctgctatgaacatggttgaacatatgtccttgttgtatgaacatgcactatttgggtatatacccaagagaggaatggctggatcttgaggtagattgattcccatttttctgagaaaccgtcatactgatttccagagtggccttacaagttcacactcccaccagcaatggaggagtgttccttcttctccgcaacctctccagcataggttgtcattggtattttttattttaaccattctgacaggtgtgaggtggtatctcagagttgttttgagttgcatttctctgatggccaaggattttgagcactttcttaagtgtctttcagccatttcagattcctgtgttgaaaaatctctgtttagttctgcaccccacttttttatttcattgtttggtgtttaggtggctagcttcttgggctccttgtatattttggaaatcagtcctctgtcagatgtggggtagatgaagatcttttcccattctgtgggtaatcgtttttgtcttactgactatgtcctttgccttacagaagcttctcagtttcagaaggtcccatttattgattgcaggcctcagtgtctgtgcttctggcctgatgttcaggaatcggtctcctgtgccaatttgttcaagggttattcccactttctcttctagaagattcagtgtagctggatttatggagagatctttgatccatttgcacttaagttttgtgcatggtgacaggtatggatcaatctgcaatcttctgcatgtctgaatccaattgtgccagcaccaattgttgaagatgctatcttttttctatagatttagatttagcacctttgtcaaaaataaggtgttcttaggtgcgtgggttaatatctgggtcttcaattcgattccattggtctatctgtctattcttgtgccaataccaagctgttttcagaattatggctctatagtagagcttgaagtcagggatggtgatgcctccagaagatcttttattgtaaagagctgttttggctatcctgggtttttttatttttttccatataaagttgagtattgttctttcaatgtctgtaaaaaactgtgttgggattttgatggggattgtattgaatctgtagattgcttttggtaggattgccatttttactatgttaattctccctatccaagagcacgggagatctttccattttctggtatcttctttaatttctttctttaaagtctcaaagttcttattgtacaggtctttcacttttttggttagtgttacccccagatattttatgttgcttgtggatattgtgaaaggtgatgtttccatgatttctttctcattgagtttatcatctgtacccagtagggctacagtttttttgagttaattttgtatcctgctaccttgctgaagatgtttatcagctgtaagagtttcctggtagagtttttcgggtcacttatataaactatcatgtcatctgcaaatagtgaaagtttgactttgtcctttccaatttgtatccctttgatccccttttcttgtcttattgctatagccagaacttcaagaacaataatgaagaggtatggagagagtgggcagccttgtcttgttcctgattttagaggaaacacttcgagtttctctccgtttagtttgatgttggctaatggtttggtgtatattgcgtttatcatgttcagatatgttcctgttattcctgttctctccaagatctttatcatgaagggatgttggattttgtcaaaggctttttcagcatctagtgagatgatcatgtggtttttctttttcagtttgtttatatggtggattacattgatggtttttcgtatgttgaaccatccttgcatccctgggatgaagcctacttgattgtggtggatgatttttctgatatgttcttggattcgattagccaatattttattgagtattttagcatcgatgttcatgagggatatcggtctgtagttctctttcttagtcctatctttgtgtggtttgggtatcaaagtgattgcagcattgtagaaagagtttggcaatatcccatctgcttctattgtgtggaacagtttgaggagtactggaattagctcttgtttgaatttctggtagaattctgcagtgaagccatctggccctgggctgtttttggttgggaggcttttgatgactgcttctatttgattaggggttatgggtcgatttaaactgtttatctgatcttggtttaattttggtaagtgatatttattcagaaaactgtccatttccattagattttcgaattttgtggagtacatgttttcaaagtatgacctgaagattctctggatttcctcattgtccgttgttatatcccccttttcatttctgattttgttaattagcatgctctctctctctctctctctctctctctctctctctctctctctctctgccttttggttagtttggctagaggtttgtctatcttgttgatcttctcaaagaaccaactctttgtttcattgattctatgtaatgttttcctagtttctactttattgattttagctctcaagttgattatttcctggtgtctactcctccttggtgagtttgcttctttttgctctaatgctttcagttgttctgtcaattctctaatgtgacttttctccagtttcttcatgtgggcacttagtgctatgaacttccctcttagcactgctttcagggtgtcccataagtttgggtatgttgtagctgcattctcattagattctaggaagtctttaattgttttttttatttctacctcaaagcatgaatggtgcaattgggtgttattcattttccaagagtttgcagggaaaagatctgaaaactccgaaagaaagaggtcctgggtagatattctacctacactaagtgaccacagatgccagcccagactattgtacccagaaaagctttcatttaatatagatggagaaaacaagatattccatgacaaaaccagattcaaacaatacatatccatcaatccagccctacagaaagttctggaaggaaaactgcaagctaaggaaattaactacaaccagaaaaatgtaggcaatagataatcccactttacaaatagccaaaagaaaaagggggtggaaacccacacatagtttcactaccaccaccaaatccaaaacaaacaagaatgaacaatcaatggtcattaatatccctcaatattaatggtcttaacttccttataaaaagacacaggttagcagaatggataagaagacagaatccatccttctgctgctcacaagaaacacacgtcaactttaaagatcgacggtgcctaagaattaagggttgggaaaaggttttccaatcaaatggtcccaagaaacaagcaaggatagcaatccaaatatacaacaaattggactttaaactaaaaccaatcaaaagagatgaaggaggtcaccagacagaaacttaacaaagaaacaaaggaactaatagaagttatggcccaattgggcttaacagacatctatagaacattccatccaaataaaaaagaatataccttcttctcagcaccacatggaaccttgtctaaaatccacctcatacttggaaacatagcaaacctgaaccggtacaaaaaagttaaaataaccccctatatcttatcagaccaccatgctttaaagttagaattcaacaacaaaactaattgcagaaaccctacaaactcatgcaaattaaataatgccaattgcacaattcctagatcaatgaagaaataaaaaaagaaattaaggatttcctggaattcaatgagaatgtggacataacctaccccaaacctacaggacactttgaaagcagtgataaaaggaaagttcatagcaataagtgcccacataaagaaacaggagaatagtcacactagagaattaacagcacaactgaaagctctagaacacaaagaagccaatacaccctggaggagtagatcccaggaactaaccaaatagtggggtgaaatcaaaaaagtggaaagtgggagaacaatacaaagattcaataaaatgaagagttcatcctttgagaaaaatcaacaagatagacaaacctttatccagacttacctaacggcagagagggaacatgcaaattaataaaatcaggaatgaaaaggggggcataacaacagacacagaggaaatccacagaatcatcaggtcatacttcagaaacctgaattcctcaaaatttgaaaatctaaaggaaatgtacaattatctggatagaattcacttaccaaaattaaatccagaacagataagcaacttaactggacctataacccctaatgaaatagaagcagtcatcaaaagtctcccaacaaaacaagcccagggccagagggcttcagtgcatatttctaacagaaattcagggaaaaggtaattctcctcaaagtattccacacaatagaagcagaagggtcattgccaaaatctttttacaagtcttcaataaccttggtacccatgccacacaaggacacaactaagaaagagaactacagaccaatctccctcataaagattgatgaaaaaatactcaataaaatactggcaaatggaatccaaaaacacatcagagaaatcatcaaacattatcaagtaggcttcatcccagggatacaaggatggtaaaacatatgaaaatctatcagtgtaatccaccatataaacagactgagaaaaaaatgatcatctcactacatgctgaaaaagcctttgacaaaatccagcactcctttatgataaagatcttggagagatcagggataacaggaaaataccttcacataataaaagcataaagagcaagccgacagccaacatcaaattaaatggagagaaactcaatgcaattcctctaaattcagggacaagacaaggctgtctactctctccatacctctgcaatattgttcttgatgttctagctagaagaataagacaacaaaaggagatcgaggggatacaaatcggaaatgaagaagtcaaactttcactatttgcagatgatatgatagtctacataagtgaccctaaatactaccaaggatctcctacagctgataaacaccttcagcaaagtggcaggatactagattaactaaaaaaaaaaactgtagccctaatatatacagaagataaatgggctgagaaagatatcagagaaacatcaccctttaaaattgccacaaacaacataaaataccttggggtaatgctaaacaaaaaagtgaaagacctgtaccaaaaaaattttgagtctctaaagaaagatattaaagaaaataccagaaattggaaggatctccaatgttcttggataggtaggattaacatagtaaaaatggtaatcttgccaaaagcaatctacagattcaatgcaatccccatcaaaatcccagaacaattcttcaaagaccttgaaagaacaattctcaacttcatatggaaaaacaaaagaactaggatagccaacaaaaaagccctgtacaacaaagggattctggaggcatcactgtccctgacttcaagctctattacagagctataattctgaaaacagcttggtgttggcacaaaaatagacaggtagaccaatggaattgagttgaaaaccctgctattaacccacacacctatgaacacctgatttttgacaaagaagttaaatttatatgatggaataaagaaagcatcttcaataaatggtgctggcacagctggattcagacatgcagaagattgcagatagatccatatctgtcaccatgcacaaaacttaagtgcaaatggatcaaagatctcaacataaatccagccatgctgaatcctctagaaaagaaagtgggagatacccttgaatgaactggcacaggagaccgcttcctgaaccttacatcagtagcacagacactgagatcaactgataaacttctgtaaggcaaaggacacagtcactgagactaaacggcagcccacagactgggaaaagatattcaccaaccccacatctgacagaggactgatctccaaaatatacaaagaactcaagaagctagtctccagaacaccaaacaatccaattaaaaagtgggatacagaactaaatagacaattctcaatagaggaatctaaaatggctggaaaacacataagaaagtgttcaacatcccttagccatcagggaaatgcaaatcaaaacaactctgagataccatcttactcctgtcagaatggctaaagtcaaaaacaccaatgacagtttatgctggagaggatgtggagaaaggggaacattcctccattgctggtgggagtgttagcttgtacggccactttggaaatcagtatggcgactccccaagaaaatgggaatcagtaccacaagatccaacaattccactagtaggcatatacccaaaagaaacacattcataccacaaggacatcctagatgcccctcaaatgaagaatggatagacgaaatgtggtacatttacacaatggattactactcagcacacacacacacaaaaaaaaaaaaaatggaatcttgaaattcataggcaaatggatggaactagaagaaaccattctgagtgaggtaacccagtcacaaaaaaagaaaaatatggtatgtactcactcatatgtggattttagacattgagtagatgattaccagcctaaaatctgcacttccagagaagctactaaacaaggaggaccctaagagagacatacatggtctcttggagaaggagaaagaggcaagatctcctcagcaaattgggtgcatgatgtaggggagggagctaggaaaatgagaagaagggaagaggaggggtgaggaggacatgatgcagaaggaagtttgagttgggggaagaacagaggagataagaaataccattatacagggagccattataggtttaaagagaaatcaggcactatggggaatgtctgtagatctataaagatgacacaaagtaacaatctaagctacagaggagaggctaccttaaatgccctcccctgataatgagattgatgactgatttatatgccatcctatagccttcatgcagcagctggtggaagtggaagctgacacccacaactaatcactgaactgaacaggaatccagttgcagagaaggaggagtgatgagcaaagtggtcaagaccaggctggtgaaacccacagaaacagctgacctaaacaagggagaactcttgtttcccagactgatagctgggaaatcagcatgggactgatccagacctcatgaacatggatttcagtgaggagacctctgaaatctatggggccttttatagtagatcagcgcttatccctagcataggaatagacattgggagcccattccacatagagggatactccctaagcctagacacaagcgggtggacctaggccctatcccaaagtacatgacagattctgaagacccccctatggaagcccccaccctccctggagagcagaaagggtatgggatagatagggtgttagttagagggggaaggggaggaggggaggcagattgaactgggattgacatgtaaaataatcttgtttctaatttaaataacaaattgagagaaagaaaaaaatggataaatgatcaaacatacatattttatgtctcctgaattaatattaagtgctgacaagcctttaatcatagcacacaggagggagaggcaaatggatctctgtgagtacaaagccagcctgctctacatcaagagctccagttcaaccaatgctagattgtgagactcttgtctccaaaagcaaaatacatcacaacagaaaggaaagggggaaaagtaacaaatcaactaatcagtgcactgaaaagctgcctttgcatagaaactgactaactttactatttttactgttctgttacctagtcagggtatctaatttataatcagaattacattgagaggtttctgtttctttcatttgcattggcagacttttctgtgtttaaaaagacagtgatggggatgtaatgctggagaagggcatttctttttttacttatttattatttttattgcgctacacattttctccactccctttttcatctcccctttcctcttccatcctccaccctcccctcatgctcccaatttactcagtagaacttgtcttttcccccttcctaggtagatacatggatgtccctcttggggtcttctttgttacctagattctctgtgtttgaggcctggaggttggcctggcattatgtctaatatccacttaggagtgatggcaaattacatttgtctttctgagtctgggttaggtgaaaggcatttctaatatgcgggaagctctgggttcaatccccagcaccacatacagccaggcttgattactcacacccacagtcagcactgaagacggagggtcaggatttcaaggttaacactagctatgtggtaaatgggaagctaatctgggctataggagaccatgtctaaaaccgataataaagaaatttaggaagagatactttgtgttgagcttggctaagtgtcagtagaagagcatttgtaaaggtatttgctaaattgttattccttctggacagggagggtaggaaggaggaaaacacatacatatatactgtcagtttggagtaattcagcattgtaactttgtgttgttaacaagttccaaatgactaccactaagggtaagcacagctcttgctcttaaatacaaatggtcatcaacaaaaggaggtaattctttagcaaaatgggaaaaccaaaaataatacttacatgaaaagtttatatttttatcaatactttttttcagaaatatgacacaactactttcaacaaaacatataatttaaaatttttaaaattacgagctgaacaaagtctctattctctcaacagctttcttgaaagcattatgaacttctttattcctcaagctatagacaactgggttcaacatgggaactactatggtgtagaacacagatgccatttggtcattgtccagggaatgactagaactgggctgtagatacatgaagattacagttccatagaatatggtcacagcagtgaggtgggatgcacaagtagagaaggctttctttcttccttctgctgaacgcatcctcaggatagcaatgaatatgaatgcataggaggtcaagataactatcagagcaaaaaaggaattaaatgaggctaagataaagagcaagatctcattcatatagatatcagagcaagaaagatccagaattgaagggatatcacagaaaaagtgatggaccacatgagagtgacagaaggaaagggaaaatgtgaatccagtatgtatagcagacacaaaaaatccccaggcatagcatccgatcaccatgtaagtacacacactagcagtcatggtagtggcataatgtaagggcttgcaaactgcagcatgcctgtcaaaagccatggcagcaagtaggaaagagtcaacacagacaaaagacacaaagaagaacatttgagcagcacatcccccataggagataactttatcccctgtgagaagcccagccatcacctttggagtcacagctgaggagtaaacacagtctgccagagagaggttactgaggaaaagatacataggagtgtggagacgggagtccagccagatcaacacaatcatgcccaagttcccaattagtgtgatgagatagatgagggtgaatgttatgaacagggggacttccagatccgggttgttagtcagtcccaaaagtgtaaatttaatcaccttagtgctattctccatgtatgacatgttgaaattgtatatcacctgtccaaacaaatagaaaagtaaacacattgttaatgagtaggaattgatgacagataactgtcattcaaatggaattatctgcataatctcactactaaagcaagatccccaataactgtgaaactgccataaccttaccatttcctttcaatgtaattgctagagccctctgtatggcatctgttagttccagcagcactcagatatgcttaatgaccactcagctgtcttcaaattttcaatcaaatattcttatttggttttacattttatttcagaaattaactactctgactttcataactgtcatttcagagtcagatacaagtgaactaagcactatgtgctatgtgactagaaagtaagggatatgaatatgtataatcttcctatcttgttgtatatttgccaagaacagtgatccatgagttcctttttgggtgtaacatggtgagatatgagatattcatccatacagctggaatccatttgaaatctaaagaaatgcattcatcctttgactcttcaaagaaaacagtcatccttgacagaccagtccaaaaagtatataaaactcaacacttaccatccaaataaacactacactaagcaaccaatacttgcaacaaagaataagagagatgcttactcttaattacccctttcaacaaacatgaactactcaagaatttatttaattagtttgaaaaatgaccattttgcttcctgcttttcctatggtgcataattcttgtggatgattttaaaggtgctttgagaccatacaagcatcctcagaggtagcatgctgtgattgaacaggatatagtctctgtcactgacctgtgttcactttcttcctgattaatccactcacacttcaggaagcactgagtgagtagccacttttctgtgtctcagtttaaaatgccaatgaaaagagtccttcttcaggatgtttggagaataagttgatacctttaaatcactgagaattctggctcattgttaggaaacaacaaaacataagatgttatcactaaacaaataatactgttaatagagtagtaataatatatacagtatcttggagaaaaaacaaaatatcaaaaaactcaaaacaaattttaaccatatttctaaaatatcattatgtgggtagtttttttaacttaaattcagacttgtttaaacatgtatatgactttgacaaatacaaacaatatgaaattttactctgagacacaaatgataagacacccctttttgcatgacgatcttttgaaggttgtgatattttatttaacaccataatcacatcatgaaaattccttcacaatttttatgattgtgctcccttatcatagtctgcctatgccaactggcacttacccaattttcaaaatatcctttgaatatctatccaaacttaataaactcttaaaataatgaagtccaaagattgttccatttgggctcttttcccctcagttcacatataatccatgagtatgtgctgttaatcatatctccaaaacacccccaaaatttgttccctagtcaccaccattccctaacggtgagctataccaacctacactgacatttagggcacagctggaaataaatgatcccagttcagtcactgagaaagttaacaacacagaaacctgaggtgatatacaaatacagactcctggagacagaaggcctaaggactagatcttgaaaacattagaatttcccttttcaagtgcagaggggtggatatggagactgccattttctgtaaagataacgtgagttccattctcctctgtgccagatgctctactgtcctcggtcctcttagtagtgtaggttattctgatttaaattttgtttctctgttatacaatgcatatagcatatgagtaaacatagaaagggcaataattagaacaattttataatttaataaatgtaagtcattctgacattgtaaaaactgactggatttttagaaccagtaacttgtgtttagagacttggattttcacataataatttgaacatgatttacaaattcttctcaaaaagaaacaattgctactttgtaggttttggaaaacccataatgtctgacaaaaacttgaagaagcctgttgacttttgtttctgtacacatgtgtgctgcagtaatcaggacaaatcatagaatccaaaagtttttgttgtatgaatctgcttgtgaagaaaggggtattgctcaacaaaaacaacttttctaaacttttattattctcttatacattgcatctctaccaaagtttccctttcttccactcctgctacacagtccctccctccctcttcccattccccagcccttaaaaaacaatccccattgaggaatcaaacaatatctgtagcaaaaataatataaacccagagacagatattatggttcaagatgaagattagagaaacaaagccactatctcttacctctacctcagaccaaaaaaatggtgatcctgtcttcacaaatcctcagagtgcaaacgaagacctcactgctctccaccaagcctcagactgcaattctctgagttcctgtctcctcctgccttgtagttctttctctgttcagccatatcactcctgtctccatatccctagtgcttgaattaaaggtgtgtgatcccaattgctgacctttgtatgagctgcttctctcttctcttttttttaggtttattatgatagattcttaattcttttttattattttttattttaaaaccatcttttctcattttacaaaccaatcccagttcccactccctcccatcctcatgttttcccccccttccccctaatctcatccccacccactcctcagagagggtaagccttcccatggggattcaaggaagtctggcacatctctttaaagcagaaccaaggccttcccctcatatctagactgaacagggtatccctccaaagataatgggctccaaaaagccagttctagcactaggaataaatcctggtcccaccctcagtggccccacagactgcccaagccacacaactgtcacccacattcagagggcctagtttggtcctatacagtttcccctactgtcagtccagagtcggagagatctcactagctcagatcagctgtttctgtgggtatccctaaactggtcttgacacctttgctcatgctatcactcctccctctcttcaataggactcaggggactcgggccagttcttagctgtgcatctctgcaactgcttccatcaattactggatgaagattctatgatgatgatacaggtattcgtcaacctgattacagggtaagaccaactcaggcaccttctccactgatgcttaaggtcttaactggggtcatcctggtggattcctatgaatttctctagtgccagattgcttgctagtcccaatatgactccctcaatcaagatatctctttccttgctctcattctctgtccttcctgcatctccaccatcctgttccctcatgtccccccccccttctcccttccccctgagaagggtaagtagacaagacctcctgagaaaattgggagcatgttggggtgggaagaagggaaggtggaagggagggctgtttctcttttagactggatcaaattcgtgtagctcagtgtggcgttgaactaacagagatccatctgcctctgtctcctgagttctgggactgaagatgtgtctcaacactgcctggctctatggctgtagtgagctttgtattttgatctccagtggctttattagataataaacaatatatcaccacaaatatcaccaatactacagacataaagactcctaaatgaacaaaataattcatatgcattttattgatgaaattatgttccacaataatatgatttcattcactggttctcatattgcattcaatataatgttaataatctttaaattattaacaaataagagatattgagaactgggaacatatttgctggagtttaatgaagattaatttcatgaaacataatgtaaatattggtaaactgtactataaacatattaccaatataaagtttcatagtctttaaatcttcagcattaaaactccctagaagtatgctataggtgagagattggaaattaaatttaccacaggtcattacagcaaaatgtgttgctcattgaatatcatgatataaaaatatatggtagaactgaatagtagatcaaactataattttattaaataagtacactatcactattgctaataataacttgcaacaacatgtcatagatatcatgtacaattgatttttctatattttgtatatatacttattggagattttttttaaaaagagacggtagaagtcaagttcacatgaagaagaagcaaggcttcatgagttactttttggtttgtttgattgcttttgccatgagtgtgaagtggtgtgtgtgtgtgtgtgtgtgtgtgtgtgtgtgtgtgtgtgtgtgtgtcttgatcaccatacaaaaatagtatgtcttggtatggattctttattccaaaatgttaaaaccttttaaccaagagcttataaagcagtggttctcaacctgtggatcatgacccctatggaggtcacatatcagatatcctgaatattacatatttagattatgatccatagctgtagcaaaataacagtgattaagtcgcaatgaaattattttatgtttggggttcaccacaagatgaggaactgtatcaaaggattgcagtattaggaaagttgaggatcactgttattaagagtctctataaagttaatcatgaaatttagctttatacatatgggaccactgtattagttactttttcattactgtgataacataccatgaccaaaatcaacttatcagaggcaggatttatttgaatgcatggtcccaggcattggctggagcaggaagctgagagatggaaccctcaatggcaaacatgcaacacagagaaaaaaaactggaaataggaagagactatattctctcaaaatccacccttggtgacatacttcctccagcaaggctgcagctcctagacctgccctgcatagtaccaccaattgagaaccaagtgttcaaatgcctgagcctacgtgtgacatttctcattcaaatcactgcaaccacaaaatgctcattaaatggagcattatacatttactgactctgtttattcattgattgttcattgtctcaagaagcatttactctgtgcttactaattcattttatctcttttgtaataactaattaaacaattttaaggtttcattgcgacatttctccatttatgaattttgttcacattcacccatctattattatcttgttcttcctattcctaataatatcccttttaccttttttcctttatttttcatctcctatattcttatgaaagaaacatgtgatatatatttttacagaactactaaccacagaattggaaatgactttaataatatctcctactatttaaataattgagattttatctggattttaattaagtcacatgaacacacaacatattagaaaattaggggataaaccctgaatcctttgtaaatgattactgttggaccattgcacagaataccctctatttccacagtctaaattaaccaaggggagaaacttaccatgctcttcaaagaaggtgacacagtgtcgttcgggttccaactgcacaacccattcaaagaaggaaaggctctggctgaagaagttattcttagtggcatctcataaagactgaagttcaatagcagcagatgattacatagattagagaatgttcaacctatcacacaggactactattaagacatatagacatctgaacactaagtgaagtttggagcatctgtaagagaaggacatcattcttaacacagacctcactcttagctgggggatataaatttttaatgctataggtttataatattgtgcaaatgtgtgttaaaaaaccacttaccacagggttttatgaacggatggctcattggttaagagcatgtagtgctcttgcagaggacctgagtttggattcaaacacctacctcaggagcttcccaaccatctataactccagctccagttaatctaatgcctctaacctttccaggcatttatgttcagatgagcacatgtgcatacatgcacacaattaaagagtagcagtgataaatctttcaaaaaactactgagaaataacaatctatacattaaatccaatacactatcaccaaaatgtctttggctgctctaatgaaaacagtgtcaaatagaaccatattgggattctagagaacaatacaggggatccaaggaagttatataggcataaagtccttcagagactacatgcccaggagaacagccacactctcaccccattcacctagagaagcagcaattaaactgtctgtggagacctagctcagtttcttaggaataacaatgatgtaatactattacttgtgatgatttctttattttctacctagtgcacttttcctttttttagttgaaaacattttattttttcatgatttcttcttttatctacatgctgtcaatgtcattaaaaaatagcccttatagcatcatgaaaataagctagattaatttatctgctgtaaaaattagtattaaagattcttcaaataattaaaagtaaaactattatataatctacatataccacttttgggcagatactcaaaaaaaaaaaacaaagtcaacttactataaagacacacttgcacacccacgactaccacagcactattcacggctgtcaggttataaaaccagcagatgaacgtaaaggaaatgtcttttctcagtcttgaagaatgaaatcatgttttctgcagaaaaatatatggagctagatgtcatcatattaattgaataaagtaaaccaaacattacaagagcaaatagtttatgttttcttcaatatgtggaattaaagagaaatgaaaacaaataatggttataatatactataagatgaaatggggtataaaaagaagttaacaaaggaaggaatatgtaagcaaattacattatatgtctaaataaaatataattaggctcattaagttacaaaattagtacacagtgattaaaatccttagggaaaattatttctccacatgtatttaatattttaatttacgtcttcattattgtaatattattaattcatgtaatatgtgtgtatacatatatttgtgagttttatactgatattccctctcatacacataccatgtgtcaacacaattgattcccatctaccatctcttaatttctcctttctcccctctccccactcctgaactcttccctagttgtcagtttacttactactttcaggttgactttttaaaatgtcttttatttactctcctagcaagaaagaaaatgggatacttgtctttctgagtctgacttacttcactttcacatgagttccagctctgaaaatgacataagtagccaaataaaaagtcctttgtacaagtctacctgaatatctgtatccattctgattgcacattgtggctattatgaataatgcataaataaataaaggtattcagatatagtctacatctactggttaaactactaaaagcaatgtacacatctaatgatggtctccacagaaccaaaaaatacataaaaaatttcatatggaaccaaaaaatgaccatatgtggggattggggatagggagttttctgaccggtttgagattgaatttgctgtatcctgaaactaaagtatgtggcatcttcagcaatattatcttactatccatttaagttgtacaacaatgagcaatgataatagcctgtgttagatagacctaagataatttggaagggggaggcagaggtggatatgaccaaaaaatgctgtgtacatttattgaaaatgtaaaaactaataaacaaaccaatactagaaatggaaacataaaggtgcctgattttcaaataggttacagaactagagtatgaaaatcaacatggtattggcataaaattagatgtgtaaagcaataaaatagaaaggaagatgggaagtaaagcagagaatgactgaagaaagcacccaaggatgacacacaaatgaccctgatgcaccagagaaaatatacaaccacacataaataaatgaaactgcaaattatgatgacatacgatatattagagaccaacgactagctggctatttctatctattggttataagtcccaaatatgtttttattatgttgtatgctaaatttcttacccaagagacatttagtgcacttattttatttatttattgaagatagatttcttttccttatataatacatactaattacagtttcacctccctctactcttcccagctcctccccacatccattctaatacagacccattcattccctttctctctctcattagaaaacaggcttctaagggtaagtaataagatatattctaatataataagataaaacaaaaactaacacataggaactggataaaaaacagacagaaagaaagaacccaagacaaggctcaagaaacagatacccacacacagaattcccataaaaacattaaactggaagccataatttttaatcaaaggacctgtagagtaaaaaagagaaaagaaaaatatataaataatattaaattaaaattaaaaaatacaaagcaagataaagttttttaaaaattaagaagtttagaaacaaaagccctgacacattataagacaaggaacctacgaagatatcattgagtacaatttttgttggccatatactattggtaaggcttcctgacttctagagtagtatgtttccacagtgagactccctagagaaaactaaatttccatttacaagtgagtatcaattagaaattgcttctgaattatgaatggggacatgtgtccacttctttcagctctaacaatttataaacaagctaagatcagtttacattttctcaactctcaatcctgttgactggcaacttatttttacctccaatctagattagacataaaatgctccaagaggcagtgacctttaaaattgattatttgaactatttacagctgaaaggaataaactgttttattaacttagtggctaaaggggaaatgttagggtatttagggtgacttcactaccaatggatactaaagaatactaagagcaagaaatgaggaatttctgtgcccttctctagggaaaattacttctcctttccccagttaccttttgttgcctgtaatttttttgttcagggttgaagcttggacctggcccattttagcatgtctgttgttgtccttgtttcagctaatttttaggcaatcgcattgatgagattttataggtacaacttctgacattagtaagaaacaatcctacatcaaaatcactgctcttctggcctttgcaacctttctgactctcttccacaatgttccctgagccttaggcctcggagtattttatagatatctctataatgatgagcatagatgataactctagggtatagtagtagcatatagtagtacataacttggtaaacagaagttctccaactaaatgtaaagcctacttaacaaaatggaaaccatgttgggtattggaaaatcagctaattactcagtactagtgaaatcatgtatattgggggacaatctaaaacaaccactttacaaagctagcatgatttcttttttttcattttttaaatttaaattaaaaacaagattgttttacatgtcaataccagtaccctctccctcccgttctcccataagcccctacatatcccataccatttctgttccctagggagggtaaggccttccatgggggatattcagagtctatcatatcctttgggatagggcctgggccctcccctctatgtctagtctgagagagtatccttctatgtggaatgggctcccaaagtccattcctatgctagggataagtactgatctcctacaagaggcccaatagatttctgaggcctcctcactgacacccacattcatggggtctggatcagtcctgtgctggtttcccatgcatcagtctgtggacaaagtgttccctcttgttctggtcagctgtttctgtgggtttcaccaacctagtctgcaccccttgctcattgcttctccctctctgcaactggattccagttcagttcagtgtttagctgtgggtatctgcttctacttccatcagctgctggatgaaggctataggatggcatataagttagtcatcaatctcattatcaggggagggcatttaagggagcctctccactgttgcttagattgctagttggtatcatccttgtagatctctggacatttccctagtgtctgatttctctttaaacccataatggctctctctattatggtatctcttatcttgttctcctctattcttctcccgactcaaacttcctgctccttcatgtcctcctcacccctattcttctcccattctcattctcctggctccctattccctcccccatgctccaaatatgctcaggagatcttgtctctttctacttctccagggggattatgtatgtctctcttagggccctccttgttccctatctgctctggcaatgtggattgtaggctggtaatccatttctctatgtctaaaatcaatatatgagtgagaacatgccatgtttgtctttttgtgactgggttacctcgctgagaatggtttcttatagttccatccatttttctgcaaatttcaagattccattgttttttattttctgctgagtagtactccattgtgtaaatgtactacattttctctatccattcttcagttgagaggcatctaggttgcttccaggttctggatattacaattaatgctgctatgaacataggtgaacatatgtccttcttgtgtgaatgtgcttcttttgggcatatgcctaagagtgtaagtgctagatcttgtggtggaagttatacaatgtaataaagaaagcattttcaacaaatgttgctggaataactggatgctggcatgtagaagactatagatagatccctatctatcaaaatgcacaaaacttgagtccaaatggaccaaagacctcaacataaatccagctacactgaaactattagaagagaaagtgggaagtatcctcaagtgaattggtacaggagaccacttcctgaacataacaccagtggcacagactctgagattgacaataaataaatgggacctcctgaagctgagaagcttctgtaaggcaaaggacacagtcagcaagacaaaacggcagccgacagaatgggaaaatatattcacgaaccccacatctgacagaggctgatctccaaaatttacaaagaactcgagaagctagtctctaaacaccaaataaatcaattaaaaagtgcggtacagaattaaatagagaattctcaatagaggaatataaaatggctgaaagacacataagaaagttctcaacatctttaaccatcagggaaatgcaaatcaaaacaactctgagacaccatcttactcctgtcagaatgggtaaaatcaagaacacctaggacagtttatgctggagaggatgtggagaaaggggaacactcctccactgatggtgggagtgccaacttgtacagccacttaggaaatcagtatggcaactcctcaggaaaatgggaatcagtctaccataagatccagctatcatgatttctttttttaacctttaaaatttaaattggaaacaagcttcttttacatggcaatctcagttatctctccctcccctcctctcctgctccacactgaccccttatcccaaaccctttctgctccccagggagggtgagactttccatgggggatcttcagttacaaacttctagcttaaccaatcacacaaatgtagttttacatactaataccccttctcccctcttagaaaccatagcccttactccaccaacccttcccatctcttaaattattcccagacatttcacaagtcaagtctcctgtgaaacataaggcacttggtttgtcagatcttatctgtttccttggccttgagaatgcatgccttgtatctttagctagcatgatttctaacaacattctgaacatgtctcttataccaacaggtaagtgtagtcttcacctctcatcaaagaaacttctctttgcaacagaaagagaccaccatagaaaaccacaactaaacaaaattcataaatgtttgtggttttgaggaggataatgccatggaaattatatccaatgaccttttgttgatactgtaactacatggtttgcttaaaagtttggattactttgaaactctggacttttaccatgtaatcttcattttgtttaacacaagcatgcatatgctggtcctctctcatgattagaacttaatgaaatgtttgcttacctcagaaagtattctgacaagctaatataaggtaaaaattcttctttcgcctctgtgtactatttcttttcttattcagtaggctgtgaatatgtgttgcttttattgggtgataaataaagctgatttggtcaatggccaaggagaatatagctaagagggaaatacaaacagagaaagagagagaaagatggcggattcagggagactccatgtagcagcaaaggggtaagatgccagaacattaccggtaagccatagtcatatatgatatgcagattattaaaatgggttaatttataagagagaactagccagtaataagcctgagtcactcactaaatagttatatgtaatattagcttataagtgattattttataagtggttgtgggaaccctcgagtggaagagaaactggtccagggagactagcaggacagaaaaaagcattcaactacaggtatgtctctgtgaacacaattgtgtgtctcttgtttgtttagtacttattaaaaccactgtacgtaagcaccacaaacacaaagaacatttcttattttgcatggacttattagcaagtcttgacattatagttcaaactcagcagaggtaaaaaacaatttaacatattgacatgccttcttaaaaattatatgtcaaataagggaagcatacatgttctgtagacacaaaaatataaatttctatcccttacccttactgtcaaacaggtttcctatagttcttttcttaccaaaagaattattttaaaaaattaatgaaaataaacctataatctccactgataagcagagttgaattctcatagaatatttaatcacttgctccccagttgtgtgagataagggcatgttgtagtcctcttgggatatttttcccatgagatctccttgactatcgaactctcttctggttaccacctttttacatgtgaaatctccattggcctatcactaaaggaagtggaccaaagcaagagccttttttattttgttattgatctattaataaaaccaacaattaatttctccccaatgtcatgttagcaagagtgtgttccttagggaaaaatgacagtggtattatttgtttggataaaacagcaaccacaccttaccaagtatgagaaatgatgaacagtactattttgtcacaccaggcatccttcagggcaggtgtccttggggttacctgcatgctattccttttgtgggatgagtatattattaaatttaaataggtcatataatttatctaagaaagaagacccaggaatagagcttttgttgaagggttccaaagccagggtgttattttctttcatgtggagatctttagcattcctgctagatactaagataagagtctccaaataaagacattttcttactttcaaggactgaattatgaattgaaccctaattacatatgaaggtactagatttgcatgctgcttttctcaggtaagaatgtaaactcctgggtcagacacatagccttcatgaacttgaggacagaaataagcaggagattacaacctgtgagatcagctatctttcctttggttcactgagagtttagactgcattgtttgcatatggttaaactttgtatcagagataatcggacactgtatgcccaaataaagtggtgatattattaaaatgtatttatcttaggacataaggcaattaatagatcatcggtgcctaatttacttaaagtaaacttggttgattttaaaataagtattttaactaatataatcttgtttggctcttgtagggaaagtgataatatgggttatcttaactaattccagagttgatgaaaacaccaatgggggtatcattttaaaatgttattgcaaccagtaaaatcatagtaatatttttaaaaggaggaattggtatcaacaaatgagaaaatattaaacttaataacatgttataaaatgttcatagttacaaaatcatatgatataactattatattaaaagatataaactcatactgtatttctatccacagagacttacctggtattagaaacaggacttattaaccattgcatagactgagcaaggctaaatcactgttttacaattgtaagaaaataataaatcactgtgctcttctagaaaaatggaaagtaacacaaaagcttaatatctattggcctggatgtttgattcagtaagaaaactccccacattaggaaatgtgttatgtgtgcttctggggaccaaaatgtcagcaaaattattgttcctaagacagacattgtacttattaagagaatggacagcacctggtagtttatatggcttctttgttttgatttttttaaaaagatatccaaagattctagagcagggcactctaagcatttgaatatctacttgtttttatacaagaggctcagaaggacagatcatttgctctgagttgcatttccatgatatatatatatatatatatataatatatatatatatatatatctttgaatcattttatttataacagactctctttataaaattcaagtaatattcaaatacatgtgttgctcacagaagatacaataaaatatattaaataagatgagtagttgtatcaaacacctaactactgaggttatgtgtcattgttagccaacatgtgaatgttggcaactgaatctacattctccaaaagagcaggtagtgctgttaaacatgaattctctaacccccttttcaaaactctaaaatatttaggtaaaagacatttacaataaaatcaaattcaaacgttatatttaaacatttttgatttacaaataaattggagattcaataacaggcatgactaaagcatgactaacttttcttctgtaattcataataccattgataatgggttttaaaattgtacgtttctaaatattcaaaatttctttaatagaaagtgtggtatttatctttctaagtgtgcattacttcacctgggataattgttcccagcttcacccacttacctgcaaattttatactttcatttattttgttttctcttatccaaggtttcttgcattctgagaatagaaagacagtggtacaataggaaggttctacagaaataaaggttaatctacagaaataaaggtacttattagatgcacatattatctacattttatgagtccactaagatggagatatgtaaattcatatccatggtgactaaaacataaaagaattcttacattttgctcaactgggatggctatctacataaaaaaagataactcttacatgaaaataatgagtaaaggctatataaaggataaaaggagtaagggtatagtaaaaatccaaatgaaatgaattttatcaccaagcttgtagttttcttcatttggaaggtgcacagtagacctgaagccgtatatgaaccaggaagtgggaactcatgacacacccctgctccccagcctgcacaatactaagaagtaaatttgggatatttagactctatctacagctaatgatattaggctaacattttcaaagcccacagtttgattagtcacaccagaataaagctgaaatctaaacaaaacacagaaactgaaaagttgtgtgctccttagcattacattatattatcctgactaaattaacatcttaaatgattctagttcaatgaaaagaataatttcacttatttttgaaagtttaatatgccgttgagatttttcagatagcaattaatgtgacattcttatataaccaccacctgcctcaccccaccctgcttatgacctcaattcagttgtctatggagttactagattcagatacatcctctcttttggaagacagtatgataatattttgcttaatttgattggtttaaattgaacttgaatatggatacataggttgcttagatcaggatgctggaaaggaacatatgcacatcgagagaaggcatggagaagacaatcagagtgcatcatcagtctccccccaggtctcatcctgatctcctctctctttgctgcagggaagccacacagtccacaatggagaacagtacagaggtgactaagttcattcttgcagggttaacagatgacccagagctccaggtcccactcttcattgtcttccttctcatctatctcagcactgtgcttggcaacctgggcatgatagggttgattctgctggactcacatctccacactcccatgtaccttttcctcagccacctctctctggtggactttggttattcttcagctgtcacacccaaagtgatagcaggtctcctttcaacagataaagtcatatcccatgacgcttgtggcacccaattcttcttctttgtgggctttataaccacagaaagtttcctcctggctgtcatggcttatgaccgctatgcagcagtgtgtcagcccctgcattataccaccaccataaccacaaacacatgtgcttgcctgactataagctcctatgtctgtggcttcctgaattcctccatccacactgggaacattttcaggctgtccttttgcaagttcaatgtgatagaccacttcttctgtgacgcccctcctctcctggccctctcatgctcagacacctctgtcactgagatggtgattttctttgtggtgggttttaatgctctcttctctattgtagtcatcttgatctcctacctatttatattcgtcactattttgaggatgcgctcatctgaaggacgccagaaggccttttccacctgtgcttcccacctcactgcagtctccatcttctatggcacagtcatcttcatgtacttacagcccagctccagccacaccatgggcactgacaagatggcatctgtattctacaccatggtcatccccatgctgaaccctctggtctatagcctgaggaacaaagaggtcaagggtgcattcaaaaaagctgtggggaatgcaaaatcttctataacactcaaattttagtttcacatcaaatatacaataaaacagcctcatttactttctaaatatatggaaaatattgactattcagtccctgtatttttaattattaatgttttcagctagttgtgaagcttgaagatgaaggtaatttagaaataagaggtctagaaccaattagttagaagcaatcagccatcaagaaggaatagtaaatttaaagaactttttaaataaatgtagtcacacccgctatctcatgttcatatagacatatacattcatgtgtgcatcatgcattgcacatacctctgtctctatttcatgatagacccttgggaaaaatctttactagttacataaatgaccatggctagtatctagaacatacaaacaatatctaaaaaaaaacaatataggaaataaataactcaacttaaaatcttggcatggaactaaacagagaatattcaaaagaagaaacacaattttctctcaaatgttcttcacatgttcaaattctgaaacaggaggggaattcaaattaacactactttgagatttcatcttgctcctgtcagaaaggctaagatcataagcaaaaaaataaataaataaatgctgaaatcaataaggggaaaggagaatacattttcactgttagtgtaagtaaaaactggtatagtcactatggaaatcagtataaatgttcctctaaaagctagaaataaatctaccatgtgatccagttatagctgtcctgacatattcccaaagaatctgtaacccactacagagacacttgttcatccatgtttgatgctactctgttcaatatcaagaaatggagacagcttagatgctcatcaaaagatgaatggataatgaaagtgtaaaacatatatatatatatatatatatatatatatatatatatgttctttacaggtaaacaaaaataattctttacctgtaaagaaaaataaaagtattaatttcacaggtaaatgatagggctggaaatgaacattataagttaggtaaccaagatccagtaagacaaaatattgagtgttcacttttatatatggatcctgtatttgaatatttagtatgtacacttaaattgaagttgcctagaaactagtaaggagtcatgattgtaggtagtgatttcaggagaaagagactagaatataaatattctggaggcagaaaggaaaacagtggaagaggaagaattaaatgagatgagagatgggatagcatggtacagaaagcaagtatggagagaaataatgccaaagatttttgaaaatgctatatgagtaccactactatagaagtaatataaaagtatatatatatatatatatatgtatatatatatatatatatatatatatatgcagttactctgtaacaaggggacaatccttctcccagaggttaacaaaagcgcaacaccatgtaaagattattttttcacagtggttggtcactggcttcccacatgtgccctaaacattatcaggctgcttcaattactcttggctacctttcataactttgtagtaagatcctattattatagatacttcatacttaaatcatatgacagagaaatcaagctggtataacctagaagcttcatctctactcactagctttcatagtactggaaggtgctatttatgctattgggggaagaaaagtattcaacagtcttccaaggtgtgatcccaagctacaataatagctagactgaaaagacaggtccattatggcaataatgatatgactgttattaaagtaaccagttaccttctatgagtgactctaaatcccactttacaagacataatttgtgcctgataccactaactgagccaaggaaacatgaatggctaggtcataacttctagggggaaacctaattttactattgtgcttaatgaacaagtactaatcttcccactaagatactatctttataaccacaaattggtgcatatttcaaccttcattagagcctctttgacagtagatgataatgaatttagggtcacataactgatcaatattccaaaaatgagagactgtggaatgcttagctctggatacaacatctatatcatagacactacatctaaaccacaagtgcaatcagaaaaagggggaagaaagactataagagccagaatcagtggaagtctgcagcaaaatattatttactggatatgacaggtctgatacacatataaacttatagtaatgtgacttcatacacaagattaaacaaccaaaacctcagcatggatggaggaagtgatcatgaaatcccacccatagctaaatagcttttggcaatatgactgctcagggagaaaaactgcgtttctttaaggaatgcaacccttgaaagagtactcataaatttcaaggagacagccatatgcttacacacataccagccagcactaagtaggatcagttggtttaaagggggggcttatattaaatttagggaaaaaagtggtagaggatggggaaagaattggagaggagggaatcatgatgcattggatcaaataatattcttcattcatggattctcaataaaatgtttaactaaatgtctttgtttttaagataaacccccatattgctgaggcattacataaaatcaataggcttatatgataattttaatagaaaaatatatgggaatgagcaaaattagttatatttgagtaatataaatcaaaataaaacattcaattataattattaattaccaagaattttattgttcttaataatatattaatgctataagttaataaatatgcaaatattaaaaagctttgagtcacatgtttaaaatttggaatatatattatttcaatctcaggtttgaaatgctttaaggaagagacttaatcatttttctaagactcctagcagtagtagacaggatatctgatctggcctacccctataagcagattgatgaataccccaactatcatcatagagccttcatccagtaattgatggaaccacacacagagattcacaactaagatccaggctgagctccaagaatccaggcaactagagggaggagagaacatatgagcaagggaggccacgatcatgatggagaaatcttcagagacagctgaaccgagcttgtgaaaactcatgaactctagacttaactatggacattccagggagccaagctaggccctccatatgtgggagacagttgtgaagtttggactatcagaagagactcaggcagtaggactacaatacaaactcagtacatgatctagcttcttggagcctattccctatggtgggataacatgctcagtctttttgcacggaagagaggcctggcccctgcctcaacttattatgccagactatgttgactcctcatgggagcacttacctgtgaggaggagtggactgaaggaggctaagggggaggtgaatgggggtgggaggagtcaaaggggtggcaggaggtgagggggtgggagaagtgggagggagaactgtggttggaatataaaattaaattaaaaactggaaaaaactaaaaatgtttttctaaatttaaaagttttttatgcaatgcatttttcctaccccaacttcttgcagatcctactcaccaacctactgatccaaattcatgtcctctctttgaaaaaaagtgcacacacaaaaaataataatcacgttcattttgtgttggcaaactactcttgagcatgcgcttgacctggagtatagttgatatacccagtgaaaatccataggaaaaaaaactaattttcccttttccagtgggtatccatcacaaatagcttcttggttaggagtaggaccctcgcgaggtccacttcttcccttcagttctggaagatgggactccatctggcttgaacctgtttagacccttatttactgccaatctctgtgagttagttcatatgtgtatcagttctattgtgtatggaagacattctgggtctgacagtcttcctacctcctctttcacatagatccctgagccctgaggcagagaggtttggtgaagccatctcatttagactgagtgctatgaagtttctcaccctctgcatatcgtcccggtgtgggtcactatatgtgcatccttttttatggagatgccagtgattcaaactcaggacataatacttgtgacacatgcactttactgcctgatccatctccccagtccctggaaacctaatgccaaaccttaagttgatgtagttttcatatgatatgctcaattatagatgctggcttaaatatgtgtctaatcaaggttcatttttaaaatgtttgatttctgctcaaactttatatttgaaaacctaaaatggccgaaagtcctcaccatgaagaaatgacaaaaatttcaggagacatacatgtttagcatgaattttgaccttacacaatgcagtgtatacagaaacatgtccagttaccacaccacagtaatacacataattcatatttttaacatttgtcagtgaaaatgaattacattgtaaaaggttgttaccagcttgatccctacagactaataattgtttcttccctaggaaagcagaatgaagaaagtcgggtattcacagagggaacctctctagagatctccaagtctaaaaaattccctccgtatctcttcccagaactaccaacctaactccacagcatctcatttagaaaggacccgctatgctcactgaatatcatttagttctttgaatggtagtctcttacctgaggatttgctatacacattcaatcataattaaggtaaatagccaaagataaaagtcacatttaatgatcttcaaataataacctctccaagacatatatctcagtgatttgtcatttatagacacaaccagggaattagatctgagatgtgattttactatgtttattttacaaatatgaaagaagtagatagatgactcctgcaagagatcagacaaaaattattgatatatttggaacttggttagtgtaaagatgattttactgattgttttcctggccttactgatgttagaacctttgaccactagttgagaaggtacttatgcaatatcccatggatggtttcatgattttgggctgactactctgtgatgaatgttctttcttgtatagaaatctggtaagtatctatactacaaaaacatttaacctgtgtagaagcagagggcttctgtatctgctctgagttccttgaagatagaaagttgttttaaaaccactctaagtggatgatccaacaaaggtgagcctgaagtatttgtaaatgtcagtgttcactagagagacttggtgatttgttagccagggtgattctatccccaaaaatgataaagaataagttaactggcgactttatcacattctgtatatatttgcatcttggtggaagttacaaaacacaaatacccaaaagagtgaaatgatacgtcttgaaatgtgaaattgctcctaaaaatgaattatgttttaacttgcaattcaatccttattctctctatctcttgctgattctcaagaaacatattcaacgcctgaatctagaacagtttttcctcaaggagcttgtgtaattttagagtatcacatttctcaaatactgttttcttgttgataaagtataacaagtctcttacatactccaatgatcacagacatgttcatatataaatctcttgtgatatttgctaagccttattttattaccttaagcagctaaggtaataatattttaatattgggttacacctaatgttttaagagggtttgcacctagacttattgtaacttgttatgacatgttcggttgctatccctaggaggcctgccttttctgaggggaaacagaggagcagtggatctaggagagagggtaggtagggtggggcatggggaggagttggggggatgcaattggaatgtattgtatgtgagaagataaataaaaagaaaaatggataaatgttattttgaaatgttatttcacacacaaaaaaattcaaatacaatattctcaaacatgtagttgacaccaaaagaaatctgtgaagttacaagtgacacataaactaggtcaaagcttgctctctgtgatttggttttgccaggaaagtaatatgagaaaataggagatttaataaaatggattctcttatcccaaccaagaaatgtttctaaggaatttttttttattttttaatgtcctggctattcattgccttctgtagcaaaaggcaccaggcctgagatgaagcagactttggggaaatgctgacaactaggatggaacccagaaacgtgatcaacatccccaatcaaaacatacctaaagccaaggttacttctagaacactgatactaatcttcactaaagggtctcatttcaataaagggtctgctacaagttatatattgacattcatattgcataaggaaaatgatgtcccaaagccaggctgcttttcctttttattacttacgctatttttttagattaaaataaaatcacatggttttctccttccctttctattaaatcctcccatatacctcccttgctctcttttaaatttgtgacctcttttttcaagcagaagcatgatgtggagaaagtgtaatggtcattctaagagaagagagcagagacatcactgaaattgaaaagcactatttctagatatacaattatgctgacctctgtttttaatttgcaaaatactttgacctactgtttcagaaaaagctaaaataaatgcagtagtttaaactttttaattacagaataaaattacctgaaattatagggtatagggacaacagtcatggctaaggagtaagtatgctctaaagagcaaaggagaacccatttcatctcagtgacccagtatagaacaaagggaaagttagggagagaagcttccagaattcctatagctagaatcctgaatatggcataaaacttcattaatcaaacataaagaccatcatcccatactgacaataactggataggctggggttaacagccataatttattatctttgatgtgtgtttatttatcccaatagtacctgaaagtaactggattgggggaagataggagggagtgggggatgggaacatgagggttcaagatgaccaatttggctaagaaggagaccaatgaaaagatactttgatagataaagccattatggagttagggaaaaaccttgtactagaaaattcccaggaatccgcaaggatgaccccagctaagactcttagcaacactagatagggtacctgaacccgataatcagattggtgactaccctaattgtcatcatagaacctacatccagtaattgatggaagcagatgcagtgatccacagccaacactgggcagagctcctggagtacagttgaaaagaggtaggagggattatatgagcaagcagagggtcaagatcatgactgagaaaagcatagaaacagctgacaggaggtagtgggagctcggagtctggactgacagcaggagaacctgcatgggatggaactaggccctctgaatgtgggtgacagtatcttgatctttgggcaggtccctggcagtggaaccatgatttatcccaggtgcatgaactggctttttggaacccattcctatggtgggatacctcagccttgatcagggtgtgtgtgtggggggggggtgtttggtcttgcctcaacttgttatgccagactttgttgactccccatgggatgccttacccctctaaggattggatgggggttgaaaaggaaggtggagtgggagcaagagaataaaggaagctggggttgatatataaaatgaaaaaaaataaatagaaaataaaatgaaagtagctattatcgctgtcttcaagtcgaatgaaataagatgtttgtggaagttaggttggaccagatttgataggcatctatctctctcaagaaccttagctctaagtctgttaaatctgatggtataatattgttcagaactgctctgcaggttcagcattctcccaccctagttatccataacattggctactcagaatatatatattacataaacttgtcttcaacctacttgaatgtttagggtttgggtagtatccatgtgaacatgtgcatatacgtgtgtgtgtgtgtgtgtgtgtgtgtgtgtgtgtgtgtgtgtgtgtgtgtgtgtaaaagactgaaaagaaattcagattttgttaattctttttggacagtgctagtattggaaagggaataatttattttccagattttgttttttcctttcttttacctccaaagatgaggaaatatgtgtcaaatgagatgaaattactgtatgatcaattactttgttgttcattattaacccccacaaaatgttgctgcatttgagctaaaggagtcagtgagttcagttaaattcaattttacctaagaaaattcagagctagtatctcaaaaacataggattacaacttgtcataatttataactgagagtcccatttaatgcttgtataaatacaaattagtcagcatatttagtttcataatttttgtgacttgaaaaacaaagcaaaacatattagtgagagaaaaatgatatatccaaagagtcaatagttcttgacaggtggtggcaaggaaatgttatgttttgctgaaataaggtaaagatagcatacagaatcatccataaaagtcatagttatcaatttattaatttgtttacatatctattaacaaatacataaaattttggaattttgcattccattaagagtccttcaacatggcatgtgtgtaattgattcacccaagctaattctaaatcctatgatgtttttatagaatgtagaagtataagttgatataggtagagaggtgggaagcatctgggaggaggtgagaaagggggaaaggatatgatcaatatacattgtgtgaaaaactgtaaaaaacttttttaaattatagtttatatttttcaagtttaatgggattttcaaatcatcattatcctcttttcctattgctacagagaatctaatgattataaaatgacagtgatggagaacaggacagaagtgacacagttcctcttgttgggactcactgatgacccaaaactgcagcttccactgttcaccaccttcctcctcatttataccatcaccctcgtagggaatctggggatgatcctactgattctcttgaactctcggctccacactcccatgtactttttccttggtaatctttctctggtggatttctgttactcctcagctgtcacccccacagtcatgactgagcttcttagaggagacaaggtcatttcctacaatgactgtgctgctcagatgttcttctttggaggctttgctactgtggaaaattatctgttggcctcaatggcctatgatcgctatgctgcagtgtgtaagcctctacactatgccaccaccatgactaaaagtgtgtgtacatggatgataattggctcttatgtcatcagtttcatgaatgcctccatccatattgcagacatattcactctctccttctgtaagtccaatgtgatccatcattttttctgtgatattccagcaatcatggctctcacttgttttgataacaagtttagggaactagctcttctttacattgagagtttaaatatcctttttgctctcatagttatcttgacatcttacatgttaatttttgttaccatcttaaaaatgcactcagctacaggacatcacaaggctatggccacctgtgcctcccacttcacagcagtgtctattttctatgggactgtcatcttcatgtatttacagcccagctctaatcataccatggacacagacaaagttacatctgtgttttacacaatggtcattcctatgctgaaccctctgatctatagtctgaggaataaagaggtcaagaatgcattcttaaagtcaatactacattcttacaggtaaagaatgtactcatttgctgaaggcaaaaaatttaggattttaatttaactttgtgagatgcactgtccctagcttagatctccttctcagacctcctccatgtactgaattagagttgatgtccacaccaaattaaagtagatgaaataatttccttacttcttcaaaactcttagaaaaatattttaaacagaattctatacttgaatgatgtgagatagcttagggttttcaaataataacactattgtatcacttaattatatgtattttcttactacatctcaatgcaaatacacataaagcaatttaaagataaataccatagactgaaagaatgcctgatggtgttccatgatatgcacatgaatgtggtaaatcttatggaactgcatatgtgatgtggttatctgtggtgcttaatttaatgtgttcatctgcctggattaatgatgtatatgtgaccatatttgtaagagttcaagagtctagcattagaagcagttaaattttaaactaatacagcctctcatctatgtggctgggcatgatctcaccagttagagctcaaaaaagtacaaacctccctctctccccctcttattttatgcccctctctccctcttctcctctaacctttcctcctccccctttgccctgaacattcatcttttctcactcttagccagcagaaccaatgatccagtcctgactatctcgactttgatcttcaagacttacagcagccacatgtcacctcccttttctcaggcttctgaactcagattgcattcactcccatcttctgttcttctgaagcttgaagggagaatatcaaggtacttcccaaactccatatcacatgagtcaatacccacaatacatatccttttatttgtccttgtatatcatatcctattgattctgtttcttatgataactatggaaactacaaaagcatttagtgagtgtaatgttttgaatgagaaatgtcttctaagggcttacctgtttgaacacttggtcctagttggtgctcctgcttgaggaggtttaaatagtagagccttgctagataaagtacattacttaggacaggcttttgagtgtagcctttccccatttccagttttctctctacttaatatttgtgattgaagatgtgatcccttgacctccagctccttccaactctcctgcctcttgctgccatgcctactgttatgatgaatacttatccctttgaaaccataatcttaaataaaattttcttccataaattgcttctggtgatttgtattatatcacatgacagaaaagtaatcaatacagtggttataatttaatctatcatttgctcttttgaacataatatttgtagaatatttatttctatgatggaatatgaggcttgagtgaaaacatgataaataattaaatgaaatcacatgtgttttatttgacattcacagataaagaattctgaaatttcctatgaattaatatttctgcgggattaagtcaatttctataaccatacaggtttatacttgaaatttcaaaaggtgcaataaaaacacaaaagagtagaggtctaattgaaatattgtaatgtattcatatatagttaaccatcatcaactggtatttgaatcaagctgagaaattctgagaaattaagaggtgtaattttctttaaaaaggtgctttgaaaactttcataatggccatttatttatttattatttttatttctttttatttaaattaaaaaacaatctcattttacatacaatcctagttccctctctctctcatattcacattccccccacctccccatccacaccccatcaactcctcagagaggatgaggcctcccatgggggatcatcaaactctgtcacatcatatggggcaggactgaggccctttccctgtatctaggataagcaaggtatccctccatagggaatgcgctttaaaaaagtcagttcatgcatgaggcataaatgctggttccaccaccagtggccacatagacaagcttcccaactgacacccatgttcagggggcctagttcttcttacaatggttcaagagctcccacttgctcaggacagcagtttgtctgggttccccccaacatggtattgaccctttagatcaccactcttccctctctacaactgaattccaggagctcagctcagtgcttagctgtgaatctctgcttctgtttcaatcaggtaaaggatgaaagatccatgatggcatttaaggtagtcagcaatctcattataggggaagagcatttaaggtagcctctccactattgcttagattcttagttggggtcagccctgtagattcttgggaatttccctcatcccaggtttctccttaaccccataatggctccatctattaaggtacctctttccttgctctccttctctgtcctactcccaacttgaccttcctgatccctcatgttctcctacccctacccccttctcccctcctctttcgcctacctcactctcctcatactcccaatttactcagcagatcttgtcactttccccttggggggacacggtcatgtgtgtctctcttagggtcctctttgttttccagctcctcgggggttgtgaaatgtaagctggttatccttggctctatgtctaatatccatatatgagtgagtacataccatgtttgtccctctgtgtctgggatacctcactcaggattgtttcttttagttccatccatttgcctacaaatttcaacatgtcggttttttttttcttaccactgagtagtattctaaagtgtatatataccacaatttctttatccgttctttggttgaggggcatctaggttgcttccggtttttggctattacaagtaatgctgctatgaacatggttgaacagatgtcttgtggtgtgagtgtacatcccttggatatatacccaaaagtggtactgctccatcttgaggtagatagattcccaattttcagagaaactgccctactgatttccaaagtggctgtgcaagtttgtactagatggtgtctcggagttattttgatttgcatttccctgatgactaaggatgttgagcaatttcttaagtctctttcagccatttgagattcctctgttaagaattctttatttagatctgtatcccatttttaaattggattatgtggtgtcttggtgtctagcttcttgagttctttgtatattttggcaatcagccctctgccagatgtggtattggtgaagatattttcccattgtgtaggctgccattttgtctttttgactgtttcatttgccttagggaagcttttcagtttcaggaggtctcatgtattaattgttgatctcagggtctatactactggtgttatgtttagaagtagtgtcctgtgccaatgcattcaagggtacttcccattttctcttctgagaggttcagtgtgactggatttatgtttattttttgatccatttggacttaagttttgtgcatggcagtagatatggatctatctgaaatcttatacatgtcagcatccaattatgtcagtacaatttgtttaagagatgttcttttaccattgtataattttatcctccttgtcaaaataacaagtgttcacacatgggttgattaataacaaggtttttgattcatctctattggttcacttgtctgtttttgtgccaataccaaccaattttcatcactatagctctatagtagagctaaaagaggcatggtaatgcctcttgaagttccttaatagtacagaattgttttggatatcctgggtttttttgtttgtttgtttttccatatgaagttgaatattagtttttttttcagggactgtgaataattgtgctggatttgatggggattgcattggatctgtacattgattttggtaagattgtcattttttttagaaattgctgtgatttttattcaatttgaagtcctgattaaaataaaagcagtgagaatgaagctttacaaatggtgcaaattaccccgacacattaccccgacatggtccttagtaaaaagctattctggttaggtggtcttgacattgctgcatgcaggtcttgttgcttgcaagggctctgaagagcttcattcattaaaataaacaaaacaaaacaaagatccctctcacaggccaacaatggccagaagcagctttctgtagtctccattcttgtcactagcaatcattgtgctcagggtcttctgatgcatctgggtgaatatctgttttatctgatcaaggtcaatctcacttcgagtgaccacaatcctgaccagcatggagtcatctgtgccagcacctttcatggagtagtagagtcgctcagcaaagaaggcagggcagtttagggtgcactgcaagatgttctccaaaccactttcaatatatccagagaactctcgacttacacggcttaagaaatctcaattacccaggctggaataagcctccatggtggctttcagctaagggaagtttctggtggcaaggatcatgttgaagcaggactcatctgtccctagctttccctcaccagcctgatagaggtgctgggattcatccagagtcatctggtggtttgcactctggttctcatcacggtttccctggcacatgggtatgaggagacgttcaaaatgtcctgaggtatctgacttaatgtccttctcaaggtctcgtccaaattctgattgataacatctaacaaggtctccaatttcttgatttgttcttgtgcataaaatctctatcaatacactggtggtctgttacagatttgcaggtagtctttctgcttccctgaccagcatggatagaggattcgccctagtactttttctacaaaagacaagtaatgctggccagataaaaggctatctgactggggccaagtctcactgtgtcaccaatttcatagcacaatgaacttagtcactagttcatgaactggcaacaccctagccactggagccatcaatattcattgaatattagattaacacaaatccatctctaattttcaaggtaacatttgcttacttctccatcttattacccaacaaatagtctttatcagtgaagtgctaatgttatggcagtgggatagaaagttccttttactccctaggcaatatgatcgttgtgactgatatggagacagaggatatgagactgtgtacaacaacaagttttactgtagagattccagtactaattttaagactaagactttccctcaatgatttctctttcctgagataatagtgtcttccctgttgttattttaaaaatagcatagtgtttcttcacctacacatgccatataacttagctctgtaggtgctttgaaaagtaccagaatgaaaaccataatatctcaggaaaatgttagcctcacaaccactgcaatgatgaaaagagctactattcctctaacagttccctagaagagccccattcacagtttatggtttcattaaacacagttaactgagtgagggaaaactctgtacttagagcacatgttcaaagcagcaaactatttaacattgcaactttctagggtataaaattagtagaggcaaataagtgtctagccaaattcttttgtctttaatatgagaattgctttttaatcagaacaacttaagatcacaaatagtctgtgttgcttccccaccccaatcccccagaagacatagtggaaactggggacacagtacagtgtgcttggggatttcagaagacagaaaaggatagatattttagcaaatacattgttagactggacagaaacaaagcaaacatatgtggaacaaaaggagtagtgagaagacacataacattttatccaagttagagggaaaccggcctagagataccaaggagaaatagtacaaattaaggtccatcagaggtaacagctcctcactggcaacatcttgtctagcacttggcaagttatacttggagtctcttttgggacatgtggatctcaaaatattagcttcctttcttaagctacaaggaaatatatcatatgggtgtgaaggtttacaaaaagagacaagtgaattgaaacaatgggaagccagagccaatgcaggagaagataaacagctaagaattgtaagacccgagttcctccccaaccaggacctctgccaggcccagcttcctggcagcccattcagataggcctggcatttctccttgccaggtccctgccctatcctcttttgctttattattgtttttattttattgttagctttattgttgcaatctctcaaacatgtagagaagtgtgtatcatcacggtacatcaaccacaggtttaatgataattctataccaccacccagatctccctggcagtattgtattatgtcacatatcacacagtgtattattttgttcatatacatttttaaaagggaagaaacttttacataaccagaatggattctcatatcttaaagggaaatcaataatagtgtctcaatagcaccatatccccaaatcccattatagacattgtttgtttttaagtaaaataaaataacatccatgtttttaagtagttgatatgagctctttttatttctgtctctatatagtgcctccattgttatctctgtctctatcacatctctttcatttgtatctctgcatagttatctctatttttgcctctatcatctatacctgccatctctctatctctatcatatatctttttcatatctccattatctctatctgtaatatccatctcttctttattttgtatctctcatccctacctctatatctctgtctctattctttctgtgtgtctctgtcatatctatctctgatctccatcatttcttgatctgtctctatcatacttatattctctacttctatttctgtctttgtcatcattgtgtagtactattcctggggagatggaaacaaacatccaataataccagacaggaaaacaatgatagaccaaaaatgaagataccacgaaagtccagcttggtgagctagagagtatttcttgggttacttggggttactccaggagcagaagtgactcaaagtcagctgcatcaaaaaacagcccaccttggtattggggacatttactaaaagatggaaacctgggttttattgcagctcagcatgttggagagtggcctttccaggtaactcagttgatctgagtggcttctggcagctcagcctgtctgaggggatctttcagccacccttgtggcttctatatgcttgggaagaaaggatcctagtaattcttagataattcctcaaccaagactctctttcaaggtgattttaaattgtggcaagttgacaattaaaaagtaatcatcacatatcataaaaaagaaaactatatcaaaattaaaacattaaaattacaaaataaactctttgaaggatattttctccctagtcaaatacaaaaaggatgcagtgatcgccagaggactcaatgggaccataaagttttatggatggaaccttattagtttctgccatgaggtgacattaaccaagatggtggtgaggtcacatgacatttgccttctttatgatatcattaatatatgtggcagccaatttacattgttggttccattttcaagaagccaccagagaaaatagcaaactacatgggtgctttctgttcaatgtaaactcagttccatggtaaagtgagcccacccccaatcagggcatgagtccctaggagagccaccatttcatgggttaaatatggattgctacattcttcttttttaaaaaaagacacttttgttagataggttagtatggatatagaaagaaatagtacttatggcctgagcaggtaggaacaaaatagaaaaaataataaaacagaaaaaggaatttcattgtctcagctcaaggaagctgagcccataggtaacttatagaagagctagaatcttggcactcagtttctctcagagttagagaaaagatgaggagcaagagaaaaaggagctctggataacttcctaaggactgaccagccctattccaggatgtggaaagggttggactgttttgttctctttttttctcaattacatgggctgaaacaatgcaggacaatttgctaacataacttaatatgctaaatttagatagtgaggggacttgttagccagattaacatctgagagaatgtggagggggattaaggccccagtcaacaggcaaactaatgctttgaggtttgttttagggcaatcaaagagtgtatacaaatagaggtattaaaccccaatttgggccgagtaagaatggggctagtttctggcaataagtcatcacagacaaccagaaaatggttgagaatcagttgaccaaggtctagaatgggcagctgacaactggaaagccaatttctgggagctgaaattagccccttaaggtcccaaattctagtgatctggcttcaggcaaaacccaatgctgaaagccaaagtcagaagactggacaatccctggagtctgaacaagggtgtcgtctaggatgtctgtaattgaatccagaacttgccttcatttgtgtatttaatgtactgtagtcaaagagtaaaaggcatctgctctagaggttggaagatagtgaaagtgcaagagagcaaagaagatgagaaaacaaacccaagctgagtttttgtgacacaccaataaaacctagaaagtggcttacattgctaatatagacaaaagctgcaaaaagccaggggctttcaggacacaattagcagcccttcagcctcctttaagttcagaaagcaaccacactcttggtgaaatggttatccaaaaaaggagggagatagttaaggggagatatgaaaaattgcccagaaagaaaggctggggtacatgatcctaaaaatccttcaagttttggcaccaagtattagtttggaattgatggaggtgatttggaaattaaagaaagcatagaccagactctacccgagcaggattgttctttaatcagaacaactgaagaacgctagtcactagagtagagactgtgcgccctagtctaactcttaaggaatttcatggggaaaactgaaacatctccatggcatgcccagggatcatgaaaattttacatatgcccaagacttatgtgtgtctatagaaagtctgggaagaacttgacctttttttagacaatatcgcattgagctcacaaagcagttgaggctgacctttaactccataccctccctcctccaccactcagttgatggaattgcagtcatgaaccaagaccatacaaatcttcatctttcatcttaggccaactttggggtaaaatgcagctatatataaaaattaagacactaaataattggcatattgaatatatgcaaatgcataaatatagaagaaaatgagaaaattaatggatcaaaacattttacataatatggatatgagaaagccgatgagataataaattatatagatatatggatagacagacatatagatgatagacggaataagaataactgaaagatagagaatgaatttgaaaaagagcaagtctatgggaggtacagagggataaatgtaaatgatgtattatatattacaatctcaaaaaataaaagaattttttttaaaagctaagaagtgctgataataaaggaaacagtcttcccccaagagacggaacaccaactgttgtccaataccaaatcatcacgtctgaaaatatacgtacaagtagaattacacagaaaaatcaggctctaatatgtgtgtgggggggagtgtatcaacaattaaagaaaagaggctatgaatatgaaggtcaaatacgtatgtggaggattttgagggaagaaaggaaagagagaaattatataattatattaaatctcataaaataaggaatacaaattaagtaatcaccaagagcaacaatatgctatatatgaggaaagagagtacttccagagcatataaaatactattaattaaaatgcccaaatatggacttctgttctagttcactgggaaggaacttgcttaccatgtgccaggcactaggtttaatccccattactaccagtatgaaacaagatgaaataaggaaaacttcatagttctaaagtggttatgagagaatgctactaagtaaattcatttgctgatctgagccaagattagtctgaggtagataaaactgactttgtgtagattctatataattaaaatgtgaaagctatagaaaattttgctttctccacagccttttgtaatgcactcttgacctctttgttcctcaggctatagaccagagggttcaacatggggatgaccatggtgtagaatacagatgccatcttgtcagtgcccatggtgtggctggagctaggctgtaaatacatgaagatgcctgacccatagaagatggagactgcactgaggtgggaagcacaggtagaaaaggccttctgccgtccttcagatgagcgcatcttcaaaatagtgatgaatataaataggtaggagatcaaaatgactacaatagagaagatatcattgaaacccaccacaaagaaaatcaccatctcagtgacagaggtgtctgagcatgagagggccaggagaggaggggcatcacagaagaagtggtctatcacattggacttgcaaaaggacagcctgaaaatgttcccagtgtggatggaggaattcaggaagccacagacataggagcttatagtcaggcaaacacatgtgtttgtggtcatggtagtagtataatgcaggggctgacacactgctgcatagcggtcataagccatgacagccaggaggaaactttctgtggttataaagcccacaaagaagaagaattgggtgccacaagcgtcgtgggatatgactttatctgttgaaaggagacctgctatcactttgggtgtgacagctgaagaataaccaaagtccaccagagagaggtgactgaggaaaaggtacatgggagtgtggagacgtgagtccagcagaatcagtcctatcatgcccaggttgccaagcacagtgctgagatagatgagaaggaagacaaggaagagtgggacctggagctctgggtcatctgttaaccctgcaagaatgaacttagtcacctctgtactgttctccattggggactgtgtggctttcctgcagcaaagagagaggagatcaggatgagacctggagggagactgatgatgcactcagcttgtcttctccatgccttctctcgctgtgcatatgttcctttccagcatcctgatctaagcaagtcttggcagcaagttttaagtttaattaatagtagatcatactgtttctcagaagagataatgtatctcaatctagtaattccacagatgacagaattgaggccagaaaaatgtctgctaaaagattatcagataaattactggaaaatatcaaaatcacttctatctctgtaaaaaagaaaggcatcccttattctacaccagaatagtctaatattttgatgccttctttatgttgtgacaaaataccataaattttacagagtgtaagtaacagaaactcatcgtgtactattctaacagctagaaagtccaagactaaggccttggtaattgtatgctgctgatgtttctcagttcatagattacattgtttgttgtctctctaccatgtacccagcctctctttaattaaacattagtctcattcataagagttctttccttatatactagccaacaactaagactcaacatcctgaatctcaccttgtaagtaaccaatacaacatatgaatttggtgatgaaagtaatcaggccccgacactatataaaaatgtggtgaaacaaattaatttcacttttagtttttcatcattcccattgtgtcaagaactgtcatatgataactaaagatgcttaaatagaatgtcatttgccaaaaataatcttggttttatgtaatccacaagataagcaatttatcacaataaaaaatggaataaaaccatatataagtaataaaggcatctagaaaataatggtgcttaacatttacttctttactagaggttttagcttttacaaacagatgcttttaatatggaggacatttatctggaccagagtgattaagatacatgaggaagcagaaattttgaatcaggtatatattagaagaaagggtatgtgataggtaggattttagttgcgggatggtagaggaagaagggagggagaagggagctgagatcatcatgtaattcaaccttgttttaaattcaaatatataaaaaattgaattaaattaaaattaaaaagataccctttgttaaatattgctcacttgaacaaatattgcagatagatacttttcagtttttgaaaaaaataggaattatctcaaaaatcttttaccaactttatttactacatctaaaatcaagttttacaaatatctcaataaaatagcttattttagtcttttgtgaaaatgggagataaaagaatacacatgatttgaatgggtaagtgtaaaaaatgagaatggacttaaacttggacagggtggaggtaggaaggtaaaataacactaaggatatctgtaaaggccctaatgaatcatattattattcatttacctaggttacatataatacatattatctatatatctacatatacatatacatatgaagtgtaaataaaagtattccacttgagctgacaatacctatcccaagaagcatggactatataaaaacaacaacaacataccagtcatgtagtcattgactctctaattggacacaaggcctgctctacagtaaggaattcatacgtggtgatgaaaacctagccaactaccagaagctagtaaaataattaatcttaggggagtatcatttactgccgctttaataaagcaactaattattcctaactacaatgttggtcaagagcatgatggggaaaaccacagagacaactaacctgagttagtgggagttcatgaactatggactgacatctggggaacatgggacagaactagaccctctaaatgtgggtgacagttgtgtggcttgatctgttgggaaggaccctggcagtgggaccaggatgtaacctgagtgcatgaactggctttttggaacccattgcctatggtgagataccttgctcagcttagtcctgcctcaacttgatatgctagactgttgatttcccaaggaaggccttacccccgctgaggagtatatgggggttgggaagagagaggtgggggagtgggagaaggggagaaaaggagaactgggattgttttgtaaaatgaaagataaatttttatataaaaaaagaaatactaggacattttacattaatcagactgacaggattctcagtcaacagtcagctaacattagacttcagagcaaattcagagcattctggttttccctggagacaatatctggttgcccctagagacaaacacatgaggtcattctcccaggttttgtttaactgattcaagctcagagtttgaagcaactttagtctgcacttactctccaacctgaaggttcagccaactgtttacttctgggaaccctcaccaacttagagctatgtgccaggccacttgctcactggctgcacattgtgctactgctatcctgagagaaactatgtgacttaacatgtgttatgagtgtgggtcaggccctgaaaaatgacttaccattgtcaagagttgagctgtgagaggggcaggacacagagggcagcaaggcagggagcaatgtaaggaggcagaggagtggtagtgttgagagaagcctgctgtgagagagggaagtgggagaggatgagtgactgagagtgagtaaagaatgaatgatctataaatgtgtgtgtgagagagagagagaaagagagagagagagaaagagagacagagagagagagagacagagagagatgaaagagatgctgctacatagagaagtcgtgtggggatttgtaactgaatatagaaatatgtaaccagacaggaaagagatgtttgtatgtagagagagattgtcaagaaaggaagtcaactgaagttgaagtaaaggaggttaccatcaggaaagcatatgcttgttcctttttaattaggttaccagcagaaaacatgtgcttgtttgctcttcacctcagatagaaaagtctagctaccctcagataagatatttttctaagttccactactctgaggctttcttttattactctggtactcactgggggggtggaccccatggtcagcaacacttggttttgctttttttgagacacattaaccagactggccttgaatttgcaccagtcccactgactcctgattccagaatgccaggttttcagcatgctccaacaagtgttatttggaaactacctacagattaaagtattatgtactttacttctcgggggaaaaaatgttaaaaactgcaaaaaatccttacaaaatgctatatcaatgcattttttaaagaatagcacaaggtacaaagctttctttcagtcttccccagtatctcatcttccgacattactatgttggtaaaattctactattttgttactgtaaaatgtttaattttaccttaatttattaattttatttatctcctcccatagccacctacctcccatctgctccccatcccatctactcctcttctgtttctatttagagacaggcagcctcccatggatcaaacatggcatgtcaaaactggacaaggcaacccagtataagaatgaaagtcttaaaagccagcagaagagtcagagacaacccaacccatgttcctacggttaagagtcccacaagaagaccaagccacacaactgtaacatatatacagatattttatgtacactgatgtcacaattgattatgactttctgtacaagtcatttatttaatatttgctgtgttcctatcaccaatttagaaactgatactttatgagtcataggaattattagtaccagttcacaaatatggaaactgaaatgtatgctcattgaataatatgtgaaactttaaatgttttacatctaacctaaactgagtataagaaagtaattcatttgactgactgattgtttgtcttagtgttaaacatatggccaaaagtcagtatggatagctgaaaaccatgaatgtgggaatcaaatctgaatgccagtttgtatgtctttatgaaaataatcttcatttctgaaattcagtttagtgtcaagagattgatctgcaatgctttatagcattctcaaaatactgaaaagaaatcaatattaaaaatgaaacagtatttttagtaacatccataagctacattttgtgctggatgctgcctccactctcccaaagacactaggctgttccccgtggttcaccaggctacaggctcatttccagacctatacagctctactgatatatgttgcatatcccttaacctccaggggcttcatggattgtgttatctaaagcaatggatattatttgctattttcattctcactcccaaaaagaaatcattatcttcccactgcctcagtgatacatgatggtggttaaagtcatatacactttagtgcatcaatcactagttcataacctaagaaaagcttctgctagaagaactagaacctaagatcaggagttaggattctcataattagttatgacttgcataactttttatctactttattgtactataatgtataaaactggcttttaggcctgatttctatcctgtttagtgatttctattccttctgtttctctttttttgatgataatgagcttacagattattatgacattttatattgctcccattccattaacaatgctagaattagtcttggtgactaatattaacatattttctgatttaaaagaactaggttaaagggttaattaacttgctcaaaactgtagaagcctatgttttaaaaacaagaaccaaagtcttttattttcctctatacatcacattaaacatatatgttctaataaaatctcattgtttagatatattaattctatcttgtgaaactgaccagtcaaattaaagatatgtaagtcaaatatacaaaaatgtaaagatcagccttttagctgccatgattcaactccctgcaactttatggagacagtggaaaggacatagagacttacctttctccctgaacaacacaacaatcaagtccagcacctttgtgtaggatcaagtctcaagccttgaaagaaagaatacatttttatttggtgagtcgtcttagtgcattttaaggctaagagttaactggaagttgccaaaagacattgaagaaaaaggctgctaatttccttggattcagcaaatatatgatgtgatcttgtctttcctgataatcacttcatccacttataccttgaacaatatccagtctgaagactttttccataagaagataagagaatacttacaatccctatacctgataaagagtcatgacctcaatctatgtgattattttaccctattgccattgttgtaggctctaaataacatatcatcttgagagacaatcattgttgctataagtatctactaacattaatctgaataaatgagtagtcaaagtgactctagtccttgggatgttccctataacaagaagacaactgtagttaggtgatgatttaaaaggttaaacatcaggaatgaagaggtaattatatagctatggagctctgaggaagaaaaatatcccatgagggttacaaacacattatctcaactgactggtgatgaggtgattacaggaactatgggtatctagccctgcttctgtggaagaacatgggtgtatttgcattacatgtgatgatttccttcaaaaatgcacaaactaagcttcagcattacgttcaggacaatggctcaatgtgactattaagacacagagacacagagtctgttactaaatcaagagggtctcagaacttcatccactcatgttttcttaaaagtctgaaacattgagaagaaatatcagtttatccaagtggactacatacataatggcaaaacaaaccaaactagacacacaaaaaaacaaataccagcttcatttataatatttaaatattacatacaaacagaaactaaggaacacaaaaatacaacttatttagaataaagtgcatacataggaaaatgatagagaaaaaaccagtgttactcaaattgatccatctgaaatttctctatggaaagatattccagtaaagcctaaatgtggtcccctgaaaattatatgaaagatagtaccaaacaaattgaaaaaatgaaagacacgtggtaaaggatctgagtttcaaggcttgtaccctactataatttgaatgacttttccaaaacccatgcagatttatatgctattgaaacagtattgagataccaggtctttgttgttgctactgccctacaaaaattatataaaagtagcctaatcttattcttcgggctggtatataggctttgtctttgggagatgccttcttaccagatatggtccttcactcttggactctgaagcctagagaactataaaaaatacatgtctatagagagcatagtataaatgtctctgttagagctgagtcattacccatcacttattctctacatcttatacagccatgaatctctgacttcaccaccgttcactgtaaaaagtactgccctactaaggctcagggaatatcatggtagatgggaagccttggcctaacagcagttgtcttcatgttaaagggagtagtccaaggaatagcattgctttgaccattaattttttcacctacatgttaatagttgcttagcaacaacaatgatattctctcaaactaacaaattacttataaacctacacaatggccatgaggtaaaacctgaaacaattacacggattaataccatgattttcattctgttatttttttttcaagacaaggtttctttgtgtagctttggctgacctagaactatctccattcaggctggccctgaactcacaaagatctgtctgcctctgcctccagagtactgcgattaaaaatgagtacctggcatgattttcattccttaccaagcataagatttgtaaggattctcttatcttcttatagtggaagttgtcaattgttaaggctataaggaatggcatgattatcagaaaagatgagtttagaatgtcaaagtctagtacctttgaataagatcagctctcaagtcagaaaatcagtccttaaaagaaagagtacatccttatttggagagtcttctttactgtgcctttgaaaggataacagttcactgaaaactggaagaagacaccaatggaaaaggctacaatatttccttagaatcgataaatgtatgttcttcctatatccttctccaagatctaggctggtgaatctccctggcctccctaaccatagcctcatcaaaaccctccagatctaggctgggtcaaaaatccagtgctcctggctactctaatcatttcagcctgcatgaaagccaacctctaggctttttccaggtcccatatccatgccctagcctactctcaccaaccctgccagaactagatccaacctttaggtttcttccaggattcaccctacctgcagccatctacaggtcatgtctgtactgctttcaaccaccctacttactaaccagattttcaacatccttctccaggatttagtcctgtgagtctccctgactatcccatacatgctttctctacaacccaccagacacacacaggatctcacatacagtgcactgtgaacacaaatagtaacaacaaaaatcaacaattcaaacataaaaatttatgcatacatttcaataataattttaaatatcagtgacctcagtcctccaatcaaaggccagaggccaactggatggattaagaaacaaaattgatctatctgctgtcttccagaaacacttcctagctttaaagataggtaccactttagggtaaaaggatgaacaaaactacttgaatcaaataagaccagaaaacaatgaggcatcatgatcctaatgctagaaaatatagacaataatcaaaacactaatgaaaaagagataaacttcgttctaagcaagggaatagttaaccaagaagatattctaaatgagtgtgcaacaaactctggcatgcccaatttcaggagaaatctattattggatttaaagaaacagattaacaacaatctattaatagtcagttatttcaacaagcacactttctccaaataaacagataatcagaacaaaaaatatcaaaattaattggcattatgcagcaaatgaacttaacagatatctacagaatattccaccaaaacaccttcacaatacacattctactcagaagtaggtgaaaagttttataaatagaccacaccctgaaaaataaaacaaatcattacaaattcaaagaggatgaaatcacagtttgtatcttatatgatcactgtgcaacaaaacgtataattgaccgcaaacaaatctctagatttacacagactggtggagattaagtaacttgttactgaatgatgaatgggtcaatgaagaaatcaagaaagaaataaaagcaattccagaaactaagtgtaaatgtaaatgaaaacaacacaataacaccactctcacacattgaggacagtgccatgaggaaaatctatagctctaagtgcctacatttaaaaatcagaaagaatataaataaattacttaattatcaattcaaaactgttggaaaaacaagaatgaaccaaatcagaacacagtccatggcaatatatgataaaaatcagaagagaaatcaatgacatagaaacaggaaaaaatcaataaatctaagagttgtttttttgagaatataaataaaatgtacaggccctgacccaactaaccaaaatgaagaaagagaggacctaaattaacagattcatgaatcaacaggaacacatatcaaaagacacaaaattcatgagattattttaagggtgtagttttaaaatataccccattaatctgaacattctaaaagtcatgtatgaccttctagattctgccaaatgaccaaattaagactagaaaaagttaccaacctaaaattatatctgtagtgaacatgtatagtctttttgtttcatatttgcatgcatatattattcctaattgatacagcataattcctttaaaaaatttggggatactggaaatttaacctagagcctcatgcatgccaatcttgtgtctcatccctacccctgaaagatataggcacagcttccagtgcagcaactatttacaaagcactaacatccttagtgtgaatatatagtttgtattgaaaaccttaatctgtaagacaaagcccattgtactaggacagcagtgtgtatgacatttcaaacttctattttccattatttgccttcaaaaatattgtgtatctattttagattttgtctgcatagttttcttcctgttttattgtctcttttttgttcagaaaagttatcttttataattctcaccctgagagcaataattcatctatttaccagtttatatctagctattttagttatcattcttacatattattcaagttggttacttctgaataggtgttacacttatactatgaatgttctattctttccatattgcagacttgtatatattgtatcttaatcatatctatgtttacccccaccatgcttacttcttccagaacacctaatcatatcatgctaccttcaaatcttccttttataaattttatctttatcccactgagtccaacttgcattgctgttatgctcttgcatgtagagtcatctactgggtcatggagaacacactagcagtcagacgcctaaagaaaaataactatccctcccccagcagttatcaactgccaatactgcttcagctaggagtgaaactatgggagcccctactcttctatgctagaattttacttattcttgtaccagtcttgtgtaggtaacaccatctgttctggtctgaggttatgtgttaaacagctgtcatagatttctaatgctgtgatgagatgccatgaccactgcaactgttttatatgaaaacatttcattgtgttggtttacagttcagaggtttagtctgttatcatcatggcagggcataatgatgtgaaaacagacatgatgctggaaagggagccgagggtcctacatcttgatccacaggcaagaggaagtgaacagagacactgggtctagactgagataagagagctcaaagcctgtctctacagtgacacacttcttccaacaagaccacacctcttaataatgccactgcctatgagcttatgggcgggggcaatagcataaaactaccacattccagtccctcatcccataagcttgtaacaatatcataatgcaaaataaatttagtccaacttcaaaagttcctatagtctatcacagggtcaacaatgtttaaaagtctaaagttcaaagtctcttctgaaattcatgcaatgttatagctataattccctataaaatcaaaatcaaaaatcagatcacatacttccaacatatagtggcatagggtacacattgccattccaaaatgtaggaaagagagcatagtgaggaagtattggaccaaagcaagaccaaaacccagctgggcaaagtcctaactttgtgcatcccatgtctgatgtggaaatgttcttcatatctctaatttctttcagctttgtttgttgactgcaacatacttctttctctttggcttgttccactccctgttagaagtttacctctgcaggcaaccccatgactctggcatctgctacttcttggggtttccaaaaatctgggcttcaaattcatagcttcacagaatggaggtatctataggtatcctttcaggaatacccctgccatgtgcctggccaaatcagctttccttaggagtgaaggcaaattctataacccatttcttctttccttaaacctagaatgacatggcaaaagctgcaaagttctgctgcttactgggcctggaacatggccctctcattcaattacatctttaccagctttctgtttagatggtttccttcactgcctaagtttgcctatcctgaaactgtatctgtagacaaggctggcctcaaactcagagatccaccagcctctgcctctggagtgctgtgactaaaggtgtataataccatacctgctctaagattttctttaattcctttccacaagttgaaacttagctgggtggtatcttgcagtgaggtcaccacaccctttattatacttcttaatctgtttatctcctgaacacagctccaatccacttcctggtgttccttttctcctcaaattgtacattttatatttttcctttctcagcttgctccttttctttatcaatctccattagagttaccattaataaccacatgacagagtctttactaggctgttttgaaatttctgtatcctcatgaagactcattgacaagggcaaaagagagctgcattcttcactaaagtatcacaaaaatgatctctaggcaatgcactaaaattcttctcctctgaaacctcttgagacagacccccatagttcattaaaccacattcaacatcactgccttccatgctcctactagtatggcttattatgcaccacttatagcattcaactgttttactaatacacagtcccaaggtccataatccttcatacaaaagtaaggtcaggcctaccagagtgataccccaatccctgtaaacaacttttgtcttagttggggtttctactgtgattaaaagacacaataaacatggcaattcttattttaaaaaaacatttaattggaatgtcctacagtttagaagtttggtccattatcatcagagtggcagacatgatggtatgcaagtagacgtgttgagggagaagaagctgagattcctacatctagattcataggcaacaagaagtaaattgagacactgggaatagattgggcataggagacctcaaataaggccacacctcctaataactccactccctataagcttatgggagccaattatattcaaactaccacaacagtcattttgtatgcagaaaacattttttgccctccttcccatcttccagctcttacatctttttatgaaattacataatttactttgagcacccttcccataatgccatactaccctctctcatttctctcccatctttttaatccccattgttcccttgtaagaaacactttcagtttgcttcatgctacttgtacataacttattttattgaactgtaaactttcttaatataggtactctgctcgatatacctttctaaacatttgaactgtgaatatagaaaggtatttagccaaactttatgtaagatatttaaatgtgggagttatgtttgacttttctaattaacacctttgctataatacacaattttgggatatatatatatagatagatagatagatagatagatagatagatatagatatagtatatatatagatagatagatatagatatagatatatacatttgaaatagacatatattcatataaaaatacacaggatacaagatgcataaaatatctaggttcagtttaataagttaccaaacaaataccaacttaacggaacaaatgaaatgcttccataaacgtactcccatttatactgattggattcatcatatttacacaatacaaaaataggtacaatttggaaatcaaagtaaaagtatgttgaccatcattagcaatcaaagccaaaataacgcattgtattcttactgaactggcacaaaaaatgtttagtgaaaacaagtactgatagaattctcacaccactatgtagtgaagttccactttcacatatatatatatatatatatatatatatatatatatgcatatatttgtatgtatatatgtatgcatatatatgtatgtatatattctaaaaaactaaatatatactatgatacatagccaaaatactcatgtcaataatgttaattgttacaccacactagaaataaatcaaataaataaccattaacaatatattggatacttatattttatgtttccctattaggttacttacaatgttcttactaatttatagtaaatactggacatctgacaccagggctctgctcactggatccaaactcggcagtgggatccaacacacccagacactgccaaggacccggtaacagtcctgcctccatccatgagaagaggacagacatcagagtattggaactgtttgcatctaccagaagggaaccttggtcccatacccaccaggagaggaagagattcctgctacacccaccagaagaaaggcttagaagagggcaatgtaaaagcacagtcaccaacagaaaacccaatatgacagcaccggagactaggaaccatacaccagcaagacctgaacatcacaatgcacatgaagcagaaaagaatgatgttaaaaacatcatcatgaaaatgacagaggacctcaaagaggacatgagaaaatcccttaaagaaatggaagaaaaaacaaaccaaaaaatacaagatatcaacaaatctctcaaggaaactgttcaagacctaaaaactgaaatagagacaataaagaaagcacaatctgagggaatgctgaaaataggaaagctaggtaaacaatcaggaactacagatgcaagcataaccaacagaatacaagacatagaagaggtgaaatagactcatcaaccaaagaaaatcttatgtccaacaaatccctaacacaaaatatccagaaaatatgggaaaccatgaaaagaccaaacctaagaataataggtatagaagaaggggaagaaatacaaatcaaagacacagaaaacatattcagcaaaatcatagaagaaactttcccaacttaaagaaagacatgccaatgacagtacaaaaccctacaaaacaccaaataaactgaaccaaaaaaaaaaagtctccttgacacataataatcaaaaccacaaacatacagaataacgagaaaatattaagagcagcaaaggaaaaaagtcaagtaacattaaaggcaaacctatcagaattacacctgacttttccatggaaactctgaaagccagaaagtcctggatagacattctacctacaaaaggagaccacagatgccagcccagactactatacccagcaaggctttcagtcaacatagatggagaaaacaagatattccataacaaaaccagattcaaacaatacacatccaccaatccagccctacagaaagttctgaaaggaaaactgcaacccaaggaagttaacccagaaaaatataggcaatagataatcccactttaccaacagccaaaaggaaaaaagggatagaatcccatacataatttcaccagcatgaccaaatccaaaacaaacaagaataaacaatcaatggtcattaatatccctcaacattaatggtcttaactcacctataaaaagacacaggttagcagaattgataagaagacagcatccatccttctgctgcatacaagaagcacacctcaacttcaaagacaggcgatatctcagagtaaatggttggaaaaggatttttccaatcaaatggaccaaagaaacaagtgggggtagcaatcctaatatctaataaattagagtttaaactaaaatcaatcaaaagagatgaagaaggtcacttcctactcagcacaggggaaatccatcaggatgaagtctcagttctgaacatttatgccccaaatacaaagacatccacttttgtaaaacaaaaattactaaaactcaaatcacacatgaaactgcacacacttatagtgggagacttcaacaccccattcttaccactagacagaacaccagacagaaacttaacaaacaagcaaaggaactaatagaagttatggcgcaattggacttaacagatatctatagaacattccagccaaatacaaaacagtataccttcttcttagtgccacatggaaccttctctaaaatcgaccacatacttggcaacatagcaaacctcaacaagtacaaattatttgacaaacccccctgtatcttatcaaaccactatgctttaaagttagaattcaacaaccacaggaattgcagaaaacctacaaactcatggaatttaagtaacacccaattgcacaattcctgggtcgaggaaaaattttaaaaaaaagaaattaaagatttcctagaattcaatgagaaggttgacacaacatacccaaacttatgggacacttcgaaagcagtgctaagaggaaagttcgtagtgctaagtgcccacatgacaaaacaggaaatactcacactagagaattaacaacacaactgaaagctttagaacacaaagaagccaatacaccccagaggagcagatgccaagaaataatcaaattgaaggctgaaatcaataaaaatggaaactaggagaacaatacaatcaatataacaaagagttggttctttgagaaaataaacaagatagacaaacctttatccaaacttaccaaacagcagagagtgaatatgcaaatcaataaaatcaggaatgaaatgggggacataacaacagacacagaggaaatccagagaatcaaaaggccatacttcgaaaacatatattcttcaaaattagaaaatctaaaggaaatggacaatttactggataaatttcacgtaccaaaataaaatcaagaacagataagcaacttaaatagaactataacccctaatgaaatagaagcagtcatcaaattctccaaaaaaaacaaagccgagggccagatggcttctgtgcagaattcgaccaggaattcaaagaacagctaataccaattctcctcaaagtattccacacaatagaagcagaatagtaattgccaaactctttttatgaggcttcaataaccttgatacccaagccacacaaagacacaactaagaaagagaactacaggccaatatccctcacgaatattgatgcaaaaatactcaataaaacactggcaaatcaaatccaagaacacatcagagaaatcatccaccatgatcaagtaggcttcatcccagggatgcaaggatagttcaacacatgaaaatccatcaatgtaaaccaccatataaacagactgaaggaaaaaaaaaatgatcatctcactagatgccgaaaaagcctttgacaaaatccagtaccccttcatgacaaaggtcttggagaaatcagcaataacaggaacataccttaacataataaaagcaatatacagcaagccgacagccaacatcaaattaaatggagagaaactcaatgcaattcctctaaaatcggggacaaggcaaggctgtccactctcttcatacctattcaatattgtccttgaagttcttgctagagcaataagacaacaaaaggagattaagggaataaaataggaaaggaagaagtcaaacttccattatttgcagatgatatgatagtctataggagtgacccgaaaatttctaccagggaactcctacagctgataaataccatcagcaaagtggcaggatacaagtttaactcaaaaaaatctgtagccctactatatactaatgacactttggtggagaaagaaatcagagaaccatcaccctttacaattgccacaaacaacataaaatactttttttcacaaaaaaagtgaaaaacatgtatcgtaagaattttgagtctctaaagaaagaaattaaagaagataccagaaaatggaaagatttcccatgatcttggataggtaggatcaacatagtaaaaatggcaatcttgccaaaaatcaatctacagatccaatgcaatccttcacaggccttgaaagaacaattctcaacttttcatggagaaacaaaagacccaggatagacaacacaaccctgtacaataaaggaacttctggaggcatcaccatccctgactttaagctctattacagagctatagtcctgaaaacagcttggtgttggcataaaaatagacaggtagaccaatggaatagagttgaaaactctgttattaatccccacacctacaaacaacttatttttgacaaacaatttaaatttatacaatggaataaagagaacttctttaacaaatggttttggcataactggatgcaggcatgttgaagactgcagatagatccaagtctatcgccatgcacaaaacttaattccaaatggatgaaagacctcaacataaatccaaccacactgaacctattagaagacaaagtgggaaatacccttgaattatttggtacaggagagtggttcctgaacattacaccaatagcacagacactgagatcaacaattgataaatgggacctcctgaaactgagaagcttctgtaaggaaaaggacacagtcagcaagaaaaaagagcagcccacacactgggaaaagatattcaccaactccacatctgactgagagctgatatccaacatatacaaagaactcaagaagctagcctccaaaacaccaaacaatccaaataaaaagtgggatacagaagtaaatagacaattctcaatagaggaatctaaaatggctgaaacacacataagaaaatgttcaacatccttagccatcagggaaatgcaaatcaaaacaactctgagataccatcttactcctgtcagaatggctaaaatcaaaaataccaataacagtttatgctggagaggatgtggagaaaggggaacactcctccactgctggtgggtgtgccaacacgtacagccactttggaaatcagtatggcgcctcctcaagaaaatgggaatcagtctaccacaagatcaagtaaccccactattaggcatatacccaaaaaagcacattcatacaacaaggacatctattcaatgatgttcatagcagcactattcgtagtagccagaaactggaaacatcctagatgcccctcaactgaagaatggatagagaaaatgtggtacatttacacaatggagtattactcagcagaaaaaaaacaatggaatcttgaaatttgcaggaaaatgcttggaactagaagaaaccattctgagcaagataacccaatcacaaaaagacaaacatggtatgtactcattcatatgtagattttttacatagagtaatggattaccagcctacaatccatactgccagagaagctagtaaacaaggaggaccctaagagagatattcatgttctcctggagaaggggaaagggtcaaaatctactgagcaaattggtagcacaggaagaggggagagggagctaggagaatgagaagtggagaagaggagggatgaggacatgaaggagcagaaagtttgaatcagtggaagaatagaagataacaaaaatggagataccataatagagggagacattttaggtttacagagaaatcagtcactagggaaatgtctggagatcgacaaagatgacacaagctaacaatctaagcaacagaggagaggctgccttaaatgccctcccctgataatgagattgatgactgacttgtatgccacccgttagccctcatccagcagctgttggaagtagaagcagacacccacaactaatcactgaactgaactggaatccaaagaaggatgagtgaagagcaaaagggtccggaccaggctggtgaaacctacagaaacacctgacctgaacatcagggaactcttgctccccagactgatagctggaataccagcaggggactgatccagaccccaagaacatgggtttcagtgaggaaacctcagaaatctacaggacctcctgtagtagttcagtacttatccctagcataggtgtggactttgggagtccatttcacatagaggaatactccctgagccaagacacacatgtgtgggcctaggccctatcccaaaggatatgatagactctgataacaccctatggaagtcctcaccatccagggagagcagaaacgatatatgatatgtagggttttagttgggggatgggggtggtaggggtggaggggagggagaggtaactgggattgtcatataaaacaatcttgtttctaattcaaataaaaaatctgcaaaaaaaagaaaagttcaacaactttgcagtctaatatgttcaccaagatgtttacacagatagacttactgacaggaaatatgttttagcttgtcaccgaataaaacacattttaaaaattaaaaaatatagtaaatacataaaatacatggactgcagaagtagctctatcataaagcacttacttgacttacttgtgcaaagtcctagattcattccataatacataaaaattaattaactaatacttacacagattacatagatttgtatccaattacaatttgtaattaagataagatgaatataatatatattcatcttatcttcttcaattccacacttgtctatgtgcatgtttataatgttaacatattttaataattattctacaaattctgtctgtctgtctgtctgtctctctctctctctctctctctctctctctctcacacacacacacacacacacacacacacacacacacacctatacacacagaccttgtcaagttctacaaattaacagtttgtaaatccagttgtgggcaggagataggatccttaggttttgacctggcagctaagtggtgggattatttagaaaacttcgtccatagggatgtagttgttactgggttgttgatctaagttgatgggcactagtctcatttgcctgtagaaatgataaactgagaaattaatggttgattcactctaattggaatgttctaaatccacctgatagatactgagaaatcctacctccacacctgagtttagatggctggagcagacctcctcattcatctctcttgctaatattaaaactaacagcagtaccagcgctggaaagcagagagcaattctgaaaatactcattattctatttgaccctcacagcaaccttgaagatggcatggaggtgatactatctctgctttgacaaggaggaagctgactcagagataagtggttggtttgtactagtttcacagagaagttatgtctcttatctgggactctcaggctctgtcaatggtatccattgagagtctggctcaacttctaccttctcctagggcccttccctgtacacaagtttctttctcttccttaaagctccttgctttaatatcctctcccacactcctaatttgacagtgtcatagatgcccttagctgtcatctgtcctgacatgtatgctttgtcctattgtactgtttgcaagttgttcctgaagcagaaactgttgtgtatcatcagattccttcagagacctcacattatgccttccctctagtccatgccagtaaatactgactggtgcatgatttctctgtgagctgctgtgttcaaacagtcagctccagctaccaagactgaaaataaacatgccctggttcgttcacatttgatggagtacagtaaatatttctgttgacaaggatactgaacattgagttgttagtctcaaaatattttatatcagtcaaatgtatgcagtcttcgctttgctgacataagaattacctcttaacatcttaacatcctgcagagtaccttctctttgatagggactcatcatgaagaccaaagactgattaaggcctacttgaaacttactaaaatataccctagttggtcctttcctcaatatgctaagcagaggttctgttacagatcatcatggatttttttcaattatatatattatattatatatatatacatatatatattatgtttttatttttaatggcaagaagattggttaatttctcaaagcttttttttcctcagtagccccagattctaccatatgatgaacaaatgtacgtaaaaaaaaaaaaatctaaggatatctcttgacacatcaagacctatgtcaagtacaaaacagagcagaatcaaactgtcttttatgttgatgagtttaaacaaattcaactaggctctctgctccttcctgttctagagacaggcgcattttttcatgcagtgccagccttgttcctgagaaataatggtgaaggttggagtgaatggatttggatgcctagttgctagggctgcctttgattctggcaaagaggacattgttgccatcaatgaccccttcattgacctcaactacatggtcacgtgttccagtatgactctacccatggcaagtgcaaaggcacatttcaagactgagaatgggaagcttatcatcaacaggaaggtcatcaccgtcttccaggagcgagatcccaccaacatcaaatggcgtgatgctagcaccatgtatgttgtagagtccactggtgtccattcaccactatggagaagtctggggcccacttggagggtgtggccaagagggtcatcatctcagatctttctgctgatgcccccatatttgtgatgggtgtgaaccatgacaagtatgacaattccctcaagatagtcagcaattcgtcctgcaccaccaactgcttagcccccttggtcaaggtcatccatgacaactttgacattgtagaatgactcatgaccacagttcatgccatcactgcccaggaaactgtggtatgatggccgtggggctacccagaacatcatccctgcacccactggtgctgccaaggctgtgggcaaagtcatcccagagctgaacgggaagctcatggacatggccttccatgttcctacccccagtgtgtccgtcatggatctgacatgtcacctggagaaagctgccacataggaagatatcaagaaggtggtgaagcaggcatctgagggcatcatgtggaagcaagtcccttcagagacaagaagaggatgtcagaggctctggaactggagttacaggtgattgtgagctgtctgatgtgggtgctggggaccaaacctgagtcttctgcaagagcctcaagtgattttaactgctaacccatatttcccacccctggaaagttcatttctaaagaactcaactgtagttattttttaaaaaagaataatgcagcctggaagacccacactttactacctctactggggaatagaataaaaaattaaatatgcttagaaactgaatttattatgtgctaaaacagttttagtactggtttttgaactttaagttaataactaataaattatttccctagattgtgtaatatacattctgcttggggagtttcaagtaggaagtctcactttctccttttaggcaattttgtgtggcaggaatcccccacagtgcttcgcatcccttagacccttccttaaggaaaaaactagatgtcagtaactaaatgggcgtctagcttctgtttgacagatttccttcttacaagggcaaagctcccctacactaatacaaactctgttcattctcttgctggaaataagatgccttctggccgaactcctagaatccagttgtagagaggaagagtggtgagcaaaggggtcaagactagcctgggaaaacccacagaaacagctgacctgaacaagggggagctcatggaccccagactgttatctgggaaaccaatataggaccaaactaggccccctgaacgtaagtgtcagttaggaggcctgggcagtccatggggcttctggtagtggaacagtatttatccctggagtataaatggattttgggatcccattgcccacagagggatactctctcagccttctgagtaccttctataaatgaatatctatataatgtcatcttgaaatatgcctgccatggatctgagagatttggaccagaaagttaaatgcaagtaaaaatgaaaagctgggcttaaatggcagggagagggtaagaagagaagccaaagttagacatgcaaatacagttaactgaacagccagtatcagtatctgaaaacactgtcaatatgatgaacatgcacacatttgattccatattatctttgcaatttatcctgaatgttgaatgtaaagagtacatgacttccttgagatgacatagctgatgagaataaggatttccccccagctattgacagtagaattagcattcttgtgtagcacttgggttcaaactctatttgtttgatatgagtttgactgaaaaaagcattatagaagcctttagactgttaagtctgagaagacccacattttctctctttgctgtggtatagagctgtaaagaaatatactcagaaactcaatttactatgtactgttaacagttttggaatttaaattttgaaccttaatttctcatagagcttttaatgtcataaagataagaaaagctcttgcttagagtagaaagaatttaggaagacagtgaaaatggggagaaggaagagaaaggaaagtgtaaactggtggagggcagaggaaggaagagaggtcaagaatagaatacatttaatgttttaataactgcttttcagacccaattcccaatccagcattcctctgctctatatgccactgaggagggatccattgtgcagtagatccttggctttaatggttgtctatttctgtaacacaaataataaaaacccagagatatatattggcgttcaagctagaaggtcagagaagcaaagcagccaatctctagaggttgctcacctctacccatgctcagacagaagggccaattgtatcctctgattacatctccaagctgcactgcccagcacccatcctcagaatcctagactactatgcttccctcaaagtggctggaaactaattgcccaagactgactttgcttcttccttgaatacctctctagttttgggattcaaagtgtgtgatcccaagtcctgaaatcacctttgttgagctgtttctcttttagactggatcaatttcgtgtagctcagtgtggccttgaactaacagagatccatccccctctgtctggctctatggcttgtggctagctttgcattctgaaccctcaggcaagcttaactaaatcataaataatgtatcaccacacatccctgtgaaaggtggaagcaccttcctgctgaaggacagaaaatttaagaggatagacaagctctatgtaggttctctaggtctccaattcagaagctcccgatgtctccacgtggcagtagtcatgtgacaagaaagttggcttccttatattttggccttctattccaaaactctctctttgcattgttcttgacaagacttatgaggtatccctacatagaggctttgctgtgtgcagtataaaactaaattttaagctctatgtacagctaagatttctcagttttgtatttgaagcaaaaattaatgtattttccagggcaatggtagtgcatgcctttaatcccagcatttggtaggcagaggcaggcggatctctgtgagttacaggccagcctggtctacaaaacaagttccaggataacctccaaggctacagagaaatcctgtctcaaaaaacaaaaataaattaatatatttaatttgagagttttctttttgtgattatttttcacttttccaaaaaaataaaatgcaatgacatcattgtattttaattggactatacattattaacttataatatacttataatatgattacattaggtctactttcaactacttctttttgcttatgtcccctgcttatttccccttttataattttacttattgagaactttatacataaatcctttatctatatcactgccaccacttcctcaccccattcaactcctcccatatccctttctcccaaacttatggtctcttttttaattaatattgttacatgtatatgtcatgtcaactggtagtgtcattatgttggtcttcttcatagaaccatattgttgagagttaattgagacatttccctgtcatgtctaggggacattatctacaagtcaatattctgggcctctggctcttgtttaggcaaaatctgtttatatttcgaaattttggactacatagtgacttacattagttatatctataaataccatcaagaagttaattatgtaagaattaatcactattttctcatggagacacatctgctcacactatttagctcatggaacaagatattagggtgggcttgcacttgcatctttgagtcactcttatcttaaaaaataaatccaagattttttgccattcttacattatctattaaaaaataccagaatgcaacagttagccagagtgatggggttattgaaaaaattaaaaagcaaaagtctagagctattatatgtatttgtattagattttccaaacttgataggtctgagaaatgctataattcgattcaaaagataaatatcttctttcatgaccctgggaataattgcctgctttctccacattttctgaatgtttagtaaatttgtcaggcagaaaacaaaagcacagaatgcagggcagcctctctaaagaaagaatgtatattcaaggcaaagtttaaggagttcaaatattgaaactgttgtattgttccaagcagctttttacttgtcagcaaggttatatcaacacttcaataaaagcagatggagaatccagaaacagaactgtgaatcaaagctaggaaaatgaatggagagagaagacaagaattaagatttgatcctaaggatttgatccttagcccaagccctaccattctgatacatcattcaaaataatgaaggatactttgttgctattagcaagtactaatcaaacaatgttgaataaggagacagaaatgctaacttccctgatttgatggttgtatagatttatcatgtcacataatccataaatatgtacaattaaaagaatcactaataacaaaagaaactttagctttctaaaccatgaacccaagaaactacaaaacataaatactgtacattctagttgactggtaaattaaaatgataggacagggaatgacttggtgggtaaagtgttttccatacaagcatgagaacatgtgttcatatcttcaggacccacataaaaggtgggatatgcctatagccccacctaaggaagtagagataggcagatctggtgatctcactagccaatttggtgggttctggattcagtgagagacactgcctcaaaatatttttaaaatgtcagagaacaacagtacccacatttgatatctggcctctaaatgaatatacacaggcatatgcacccacacacatgtgcatatacatgctaaaatatacacagaaaacacaaacaaataaaattgaagacatggtctttatactaaatttaatagtaaatttttcttgcagatagaaacagagcaatggaaatttaccacattcacctttgtgctttgatctgctttaaaggacatcaagagatcccctcaagaaaactgtatatttcccaggtaatatttgttctacagaagatcatcctccagaatgaaacatttccacatgatgcttcttatgccttttcctgggagctgaaatgaccactgttcctggagaaggtggaactgaaattcttcaaatttcaaaagtatcagtggctccggagatgtaccctttacttgcctgcctatttccaactcacactaaaagactgagggtaaagactgttgactattttccagagggcacttttcacttctttgttcctcaggctgtagattaaagggttcagcatgggaatcactatagtgtagaacacagatgctattttgcctgtgtccatggactggccagaactgggctgcaagtacatgaagatgattgtgccatagaagatagacacagcagtgaggtgggaagcacaggtggagaaagctttcttccgtccctcagaagaccgcattctttgaatagcaatgaatatgaaaaggtaagagatgagaattaccaaaagggcaaaaaagacattaaatcccacaacaaaaaagacaacaagctcactgatgtgtgtactggagcatgcaagggccaggagtgggggcatgtcacagaaaaaatgatttattttgttaggaccacagaaggagagtctgaaggtatttgctgtgtggatggaggcattgaggaagccacaggcataagagccaatggtcaggatggcacacacatccgctgtcatggtggtggtgtaatgaagaggcctacacactgctgcatggcgatcataagccatggaggccagaagatagctctcaacagtagcaaaacccacaaagaagaaagactgagctgcacagccattgtaggagatgaccttgttccctgaatgcagtgcagccaccatcttaggagcaacagccgatgagtatcccagatctacaaaggacaggttactgaggaagaagtacatgggattatggagtttgggatctgagaagatgaggaccatcatccccccattaccaattagagtgacaaggtagatgaacaaaaatatcaagagtagaggaacctgaagtttggggtcatctgtcaaccccatcaagaggaattctgccacttctgtgctattctccattgaagtcatcttggatttcacctgatgattaaagagaatgaaccatgaagctataaaagaggatattttgaagatataaaaatggaaaactaacatatatgaaaaaatgtaccatgaaagttataggtccctctcccatccccccatgctcccaatttgctcaggagatcttgtccctttcggagggaactaggaaaatgagaagggtagaagagcaggggtgaggaagacatgatgggacagcgaggctgagttgggggaagaacagaagagagcaagataagagataatataatagaagaaacactttggataccatcaaagttgatcaagattcgactggaaaaggaaaaacctctcgacaaggacaaatgacaggtattctactaaggtatatcttataaactaaatagaagcctcccaaaggaaagggaagtgttttgcctttatcttcacaggaaaactcatcttcagaaggcaaaggacactgcatgggtagacacttgggaagaaaaggtagctataaccatcaaacaaaggagcgtgccatacggtaaactttacagctgtctctcaaaaaaacaaacaaacaaacaaaaaaactctatttctctttatttcctagtccctattcaattaaaccaatgctggatttagaggtggatttggctttcctcctctaaaatccaagcacattatttaactaagctttagtgtttctgtgttgtatcaagaagccaattgatgtaatacagaataaaagaagaatttggggactgtctttgtcttttcttggatctttctctcaaggtgtacaccctttcataattgttatgctctcatggttgcattcctcagcatgtgtacatacacaagcaaacatttctctgctaactgttcatgtttgagtcccacacagccaatgaagacctgcctgacagcaatccctggacaccctggaaagaaaatgggccacagctcctcgactgcactggatccaacttgctccatttcagctgacactccggccagaggttcgggtactgacttcaatcaagttgaggatttcaagcgagatcttcaatcaagtgaatcccatctatactaacattttctttctacaggaccccacatgactatcatcgtcccatttcagcaggaagtaacttggaaaatgctacgccccctttccccattgttgtcacttaggatagtgtatataccttgctaggaatagcttcctattgtttatggttcggtttggaaggaggtgttcaggcttggacacctctttcagatgactttagggtttagttaaaatagatagttatcttcttatattttacctttatactgttaagttttaatcctcttttagactaaaaggggaattgtaggggaagctgtagccacgccttcttaggggctggctacaggagtacctgagggcttgtgagggcgtggtcagagtgagtagggggactgcgttttcggtttcggtttctctttgcttcttgctgtacagactaccaccggctggctggttcgctctgtaagtaaggcttttccctattaaatacccttatatttctacctgactccgtattggtaatttcctactatacatgaccgtctcactagatgaagaaaaagcctttgacaaaatccaacccccctttatgataagtgtcctggagagatcagggataacaggaacataccagaaaataagaaagacaataaacagtaaacaagcagccaacatcaaactaaatgtattcctctaaaatcaggaacaagacaaggctgttcagtctctctgtgctcttcaatattatacttgaagtcctagatagagcaataagacaacaaaaggagatcaaggggatacaaattagaaaggaagaggccaaacttccattatttgcagatgatatgatagtttacataagtgaccagaaaaactgtaccaaggaactcctacagttgatcaggatacaagattaactaaaaaaaaaaaaaaaaaaaaaaaatcagtagccctactatacacagacaataaataggctaagaaagaaatcagaggaatatcaccctttacaatagccacagacaacataaaatatattggggtaatgctaactaaacaagtaaaacacctgaatagtaagaattttgagtctttaaagaaagaaatcaaagaagatagcagaaaatgaaaagatttcccatgttcttggataggtaggatcaacatagtaaaaatggcaatcttgccaaaagcaatgtacaaattcaatgcaatccccatcaaaaataacagcacaattcttcacagaccttgggagaacaataaccaactttatatggaaaaacaaaagaaccaggatagccaaaaacaaccctgcacaacaaaggaacttccggaggcatcaccgtccctgacttcaagctcaattacagagccatagtcctgaaaacagcttgatattggcacaaaaatacataggttgaccaatggaattgaattgaaaacgctgatattaacctacacacctatggacatctgatttttgacaaagaagctaaaattatgcaatggaaaaaaagaaagcatcttcaacaaatggtgctggcgtaactggatgtggacatgtagaagattgcagatagatccatatctatcgccatgcacaaaacttaagtccaaatggatcaaagaccttaatataaatcgagccacactgaacctcttagcagagaaagtaggaagtacccttgaattaattggtacaggagactgcttcctgaacataacacagtagcacagacactgatatcaacaattaataaatgggacctcctgaaactgagaagcttttgtaaggcaaaggacacagtcaaaaagataaaacagcagcccacagaatgggaaaagatcttcaccaaccccacatctgacagagggctgatctccaaaatttacaaagaactcaagtagctagtctccaaaacaccaaacttaaaaagtggggtacaaaactaaacagagaattctcaataaaggagtctaaaatggctgaaagatgcataaggaagtgttcagcatccttagccatcaggcaaccacaaatcaaaacaactctatgataccatcttacacctgtcagaatggctaaaatcaaaaacaccaatgacagtttatgctggagaggatgtggagaaaggggaacactccttcactgctggtgggagtgtcagctcatacagccactttggaaatcagtgtggtgactcctcaggaaaatgggaatcagtcttccacaagatccagcaattccactcttaggcatacatccaaaggatgcacattcattccacaaggacatctattcaacaatgttcatagcagcagcatttgtaacagccagaatctggaagtaatctagattcctctcaatggaagaatggatagagaaaggttgtacatttatacaatggagtactactcagcaggaaaaaaatggaatattgaaatttgcaggcaaatggctggaactagtagaaaccatcctgagtgaggtaacccagtcacaaaaagacaaacatagtatgtactcactcttatatggactttagacatagagaaaaggattccttgcctacaatccatacttccagagtagcttggaaagaaggaggaccctaagagagacatatatggtaccccagtaaaggggaaaggtacaagatctcctgagcaaattgggagcatggggggaggaggtgtggatagggatctagaagaaagagaagggggaaagaatatggcagaggagctcatggggaagccggaaggttgagtcgggaatgaatagaggagagcaagataagagttaccataatagagccgggcgttggtggcacacgcctttaatcccagcactcgggaggcagaggcaagcggatctctgtgagttctaggccagcctggtctccagatcgagtgccaggataggctccaaagctacacagagaaaccctgtctcaaaaaaccacacacataaaaaaaagagttaccataatagagccatccatcataagtttaaagagaaatctggttctagggtaatttccagagatctacaaggatgacaccaactaacaatctaagcaatagtggagaagttaccttaaatgtccttccctgataatgagattggtgactacattacatgccatcctggaaccttcatccagtagctggtggaagtagaagcagacactcacagctaaacactgaactgaactgcaatccaattgcagagagggaggagtgaatagcaaaggggtcaggacaaagctggtgaaatccacagaaacagctgacctgaacaaggcggagcttatggaccctagactgatggctgggaggccagcatggaaccccctgaacgtgggtgtcagtgagaaggtctaggcaatctatggggcttctggtagtagatcagtatttatccctagcatacaaatggactttgggagcccattccacatagagggatactctctcagtctagacattgggaagggcgtaggccctgatccaaaggatataacagactttgaagatcctccatggaaggcttcacccctctggggaggagaaatgggatagggagtcagagggggcaggggaggaggaaagggagagggaactgggattgacatgtaaaataagcttgtttctaatttaaacagaaagaaagaaatatctgaaagtttcctagtcacatattcttacatatcccattacacccaattattaccacaaccaccaacaccccttcctgctttttctcactttcaaacgttttgggttatcttaggaaaacctccgtctaagatctgcattttgattttgaactgtaatatttctctttttgagattataatattaatatatttccgtcttcccttcctccctccaaatagtcccataaactcctgctttcatgctttcaagctgtggcctcatatatatatatagagatagatagatagatagatagatagatagatagatagatagatagatatagatatagatatagatatagatatatgtgtgtgtgaatgtgtgtgttttgtaatgatatacatttaatggaatatatattatataataacaaatatatataaattattcaatctgtttgtcacgagtctatgctttcagtgttgaccatttggtactggttaatcaatttggtgtgcttttccctaaggaagtcagtttctcccacttttagtattcttcagttgcctgtagttctttgtgtagggttgaggcctcgtgggctattctctatccactttggtgtggcatgtctatttttattgtctttattcagcatatatgtatgcaatctcttttagttagtgttttatttctgtggagaaacaccatgactactgcaactcttgtaaataaaaatgtttaattggggtggctcacttaccattcagaatttcagtccattatcaccatggtgggacatggtgtcatatagacagccatggtgctggagaagtaactgagagtcctacatcttgctgtattcactgacaaattaatcttctgtctgtgtctttctctctgtctttgctaaccctcactccccactcaggaactatttcagctgtgccagcaagttacatatattcatgtttgggtcttcaatatgttccattggtctatgtgtctgttatcatggcatcacaatgttatttttattgccatggctctaaaagatatcttggtctgaattccttcaaaattcctccttttttgctcagaattgtttaggtatctgggctcttttgtggttccatataaattttttctgtgaggaatgagatgggtatttagattggaattacaatgaatgcatagatattttttggtagaacagtcattttcacaagttaattctgccaatctgttgcatggaatgtctttccattttccagtgtctttctctttcattgtagaggtctttcactttatttgttaagtatatttctaattattttaagttttgaggctattgtgaatggagtgcattcatgttctctttctctgttggcatacagaagggctattgaattgtgtgagttgcttctgtattacaccacattgcagactttatgtattagttttctggtacaatttgagggaattctaatgcacattatcgtatcatctgtaaatggggataatttgactttttgttacccatttgtatttctttaattttcttctttttccttattgattcaattagtatttaaaagataatatctaaaaggagtggagataatggacatcctgtctcaactctgacttcagtgtggttgtttcaagttgtttcccatttacaaggatgttaactatggaattctcacatataacttttacttcgttgaaacatattctttctaggtctacattctctatggattttaccatgaaggcatattgaattttttcaaagccttgtcttgcatctattgagagatcatgtgacttttgtctttaaattcatttatatgggttattacatttattggcttgtgtatgttgaaccatcccagcatttcagggatgaaggcaacatgggtgtggtgttttttatgtatggctgtgttctgtttgtaaatattttattgagtgtttttgagtctatattcatcatgaataatggactgtagttttatattgtgtgtgtcagttgcaatttcccctgttctgcttctgttaattgggtcctctcttttgtttacttgggccaagtgtctgtcaaccttgtttagcttcttaaagaaccagttcttagattcactaattattttgtttcttttctattgatttctgctttgatatttattctttctttccaaagactggccttcttttggattgttctctttttaaactttttaagtcgcatcattaagtcatttacttgttctctttctgttgtgtttttttttttccttttgaaatgtaggactgcttccgatgggtcccaatggttttgttattgtattttcatttagtttctggaaaatttttgtttgtggtgatttttttttctttgatccatttcatcacaaaagaaaaagtttaaggtaatcatcattctcattataggggaagggtatttaaggtagcatctccactattgcttaggtttctagttggggtcaaacttattgatctctgtacaactccctagtgccagatttctcattaaacctatagtggctccctctattgttgtgtctcttttcttgctctcctctattcctctccccactcaatcttcctgatccctcatgttttctacccctcctcttctcccctcctctttctcctacctccctccccctccccatgctcccaatttgttcatgggctcttatcttttctacttcacagggggaccatgtatctctctcttagggtcctccttgttttctagcttctctggaggtgtggattgtaggctggtaacactttgctctatgtgtaatatccacataagagtgagtaatatcatgcttgtctttctgtgactgggttatctcacttaggatggtttcttctagttccatccatttgcctgcaaatttcaagattccattgttttttcctccaatgagtagtattccattgtgtaaatgcaccacattttctctatccattcttcagttgaggggcatctaggttgcttccaggttctggctattataaataatgctgctatgaacatagttgaatagatgtccttattgtatgaatgtgcatcctttgggtaaatgcctaagagtggaattgctggatcttgaggtagactggttcccattttcctaagaaactgccaaactgatttccaaagtggctgtgtaagtttgcactcccaccatcaatggagaagcattctgtttctctacatcctctccaacataaactctcattagtgttttctattttagccattctgggtggtataaaatggtatctcagagttgttttgatttgcatttcccttatggctaaggatgttgagcactttcttaagtgtctatcagccattttagactcctctattgagaattctctatttacttctgaactccactttttaagtgcattatttggtgttttggagactagcttcttgagttctttgtaaattttggagatggccctctgtcagatgtggtgttggtgaagatcttttcctactctgtgggctgttgttttatctttttgactgtgttctttgccttacagaagcttcctaatttcaggaggtcccatttattcattgttgatatcagtgtctgtactactatgttatgttcaggaagtagtctcctgtaccaattaattcaagggtacttcccacttaatcttctaagaggttcagtgtggctcgatttatgttaaggtctttgatccatttggacttaagttttgtgcatggcaatagatatggatctatctgcaatcttctacatgtccacatccagttatgccagcacaaataccaagctgttttcattactatatctctatagtatagcttgaagtcagggatgttgatgcctcccagaagttgctttattgtacagggttgctttggctatcctgggtcttttgttgttccatataaagttgagtattgtcctttcaaggtctgtgaagaattgttgtgggattttgatagggattgcattaaatctgtagattgcttttggtaagactgccatttttactatgttgatcttatctatccaagagcatgggagatctttccattttctggtatcctctttaatttctctctttaataattcaatgttttttgtcatacaggtctttcacctgtttgcttagagctaccccaagatattttatgttgtttgtggatattgtaaaggatgatgtttctctgatttctttctcagcccctttattatctatatatagtagggatactgacgttttttagttaatcttgtatcctaccactttgctgaaagtgtttatcatctgtaggatttccctagtagaattcttagggtcacctatgtaaactatcttatcatctacaaatagtgacagtttgacttcttcctttccagtttgtattccctttatctccttttgttgtcttattgctctagcaagaacttcaagtataatattgaagagatatggagagagtggacaaccttgtcttgttcctgatattagaggaaccacattgagtttctctccatttagttggatgttgtctgtctgtttgctttatatactaccttaaatgccatcttagagccttcatccagtagctgatggaagcagaagcagatatccacagctaagcactgagccaaaattccttcttgaatctagtttaagagaggtaggggtgaccaacaaaggggtcaagaccatgctgggaaaacccacagaaatggctgacctgagcaagtgagaactcatggtccctagtctgacagctgtggaatcaagttagaaccaaaccaggtccccggaatttggatgtcagctgggagcactgggcagtctatgaggcctctggcagtggaaccaggatgtatccctagtgcatgaatggacttcgggagcccatttcccatggagggattcgcccttagcctagatacacggggtagggcctaggcccttccccaaatgacttgacagattttgatgattctccttcatggaaggccttaccctccctggggagtggatgggagatggtatggggcgcatggatggatgggaggaagaggaagctgggattgatatgtgtaaaataagattgtttctaatttaaataaaatttattaaaaaaaaacaaaagaaaaagttatttaatctccatgagtttgagtatttactaatttttttgccaattttaagctttgtcgtattgctgtcagatagtctataaggaatgatttcaaaccttttgaattttgtgtcctatggtggtatgctgcagtataaaatgtgtactcaccagtgtttggtagaatattcttttgacatattttaagtccagtagatgcttgctgtcaaacacttctagtgttactctgttttttgtccagatgacctgtctattggagacagtggggtattgaaattatctatcattaatggatcgatgttaatctgtgtatttaaatccaataatagaatttttatgaaatcgggtacccagagtttggtatatatatgttgaagatggcaatgtctttttggttaactattcccttgattaaagcaaaattaccctctttatctctttcatttagttttatttttaagcctgtattgccagatattaggataacaatgcttgtccacttcctttttccatttgattggagtaattttgcccatccttttaatataaggcagtgtctatctttaaaactaaaagtgttagtttaggcaaaagataggtggattttgtttcttgatccattcagttagcccatgtcttttgattagagaattgagaccattgatatttgcttttaatattgaaatgtgtgtgttaattgtgatcattgtattgttgtttttgatgttagtgtgttctcggtggttttctgtattttattatggcttttattatgtattttatctgtattatgtatttttgacttggattattcttcctcatgtatgtctataattcaaatgtctgattttttcatggtatcacacatctccttcatgttcctttcctgtgtgtgtttgttttttaattgaaaattgattattttctcataatgtagcctgttatggtttcccatccctctactcttcccagctcttccccatttcccctccccctccaacccagtaactttcttgtctctcactagggcttctaagggataataaaatataataagataaaacagaaacacattgaaattggacaagaactaacaaacagaaggaaaagagttcaagacaaggcacaagaatcagatacccacttgtttacacactcaggaatcccataaaaacactaaactggaagccataatatatttgcagaggagttgatgcagacccatgcaggtcctgtgcatactgactcagtatctgtgagttcatgagcattgatcacattaatttagaagacctagttttcctagtgtcttctataccctctgactcttagactctttctgcctcctcttcatggggacacctaaaccctgtggggaaggatttgatggaaacacccattagggtggagtattacaaaagctctcactctctgcctgatgtgtggttgtgtatgtctgtatttgtctctatctacagtaagaggaaacttctctgatgataactgagtaaagcgttgatctataaatatagcatactatcattaggagtaatttaaacactatgttgttttgttgttgctgctgctgctgctgtattaggttctaccctatgactctgggctatctaacttggtcaccaaagtgtcaggtatgggttctatcttgtagagcaggccttaagtgtaatctcccacaaacttagtgccattaaattggcctatttttcagacagtacaccattgtagattttgtggctgtgtttgcatttgtttctcttttaattgcctgcagtgtatgttcctgtaccaaagatgctagaacataggggtaaaggctctgtgtaggcaagagctttacttttccatgttcaatgagtttaatgggtattgtcttcagcaattgaaattttctatcaacttgtggagggcaatctatagtcttggaatggcctgggttatttagcaattcccatgaggcctctttggcaaagaactcaattagatgaacccaatcttgttactggaaggttccttagatggcacaagatatccagttaagattctgtttccctaattatttggtgaaaacatttattttatatatataataaatatatttcgtactgcccctcaaatatcccttaatttatttccttgtattccctcccacaactccttctccccctgatcctcccattctagccatctcctatttccatccacatctatagcatttatttccctttcctaatgagatatatctgttccttctactcccttatttataacttatttctggggttctatggattgtagcttggttatcactgacgtaacaggtagtatctacatataagtgaatacataccatatttgtttttctaggtctgggacaccttacttagaatgatgttttactagttccatctatttccctgcaaatttcttgaagtcatttttagtggctgtctaatactctgtgtaaatgaatgacattttctttatacattcttctgttgagagacattctgacagttatgaatagagcagcaatgagaatgcttgagcaagtatctcggtgataggatgaaccctctttgagtatatgcccaagagaggaatagctagatcttgaggtagctcgattccacccttctgaggaactggcacccttattccacagtggctgcatgagtttgcactcctgccagcaatagatgcgtgtttctctaacttcacagtcttgccagcattgagttgccatttgtactgttgatcttggccattctcacaggtgtaagattaaatctcaaagtggctttgatttccatttccccaattgcaaggtgtaggggaaatgctagccagagcctcttggaggctggcacaggtgatgtagaccacacacatttgggtgtgggtagagtgatgtagcaagaccttaaatatgagggttacatgcatgcggctctctctgttccatggttcgcctggttgtaggggactgacgctgttgcgtgagtactctcctattaaaacaactgttcattaaacttgctctgactcctctgtggtaggcatttattatgcctcactttagctagagatgttgaacatttctttgtttctcagctacttgtgtttcctttattgagaattccctatttagatatctacccaatttttacaattgggttttttcttgaaatctatttttttgagttctttatgtatttttggatattagctgtctattggaaatggagttggtgaaaatcttttcccattctgtaggctgctgccttgtctgaatggttgtgtcccttgtcttgcagaagcttctcagtttcatgaggtctcatttattgttgatcttagtatctgtgctcatggtgttcttttcaggaagtcttttcctggtcttacaagttcaaggctattccccactttctcttctatcaaatttggtgtatcttgttttatgttgaggtctttgatccatctggacttgaattttgtgcagagtgataagtatggatctattttgattcttctacatgtgcaaacacaagaagccagactaggccagggcactttatgtgggagctagaatagatctggagagttgtggagaaagagtggatggttagtcagggagattcactgggttagacctgaaggtgaatgtgggaaatctaggtaccacaagtggagtggttagaagggctacagaagggacctgtaggtggttgcaggtaaggagaactttagagctttttctgtattagcaggcagggtaggccagaacactagttatgagactcaagctagatctggtgtgttcttaaaaagttgtggatgagtagtcagagaccgacagggctacacactggaagagaacatggaatgcctaggtaccacgtgggaacctatatctgatatgtaaaagagcacctggagaggggatgttatagtttctagagtgtcattgaacataatggaaatcatcacaactcagtatccaggtgtgcctaagatcacctcttagaatcaatagaaatatttttcatatctcttaaaaaccttaatttaagtagaaggctgttatatttattgtatatgcccctcacaacatcaatgcatctctaacccataatgtggctgtgtttgaaataaagaagtagttaattttctaactttttgtttgaaaattacataagaagatttttaaaaactatttttcaccatttacattcaaaattgaggtaatatcattacacatctttccacacatgagaactaggaaaggcatgtgtatcaaggatttccaagacactttgaatttcttaagatgaaagcacctccttctctttagtaatattgacacacattcctcaactttgctggcaaattgtacaaggagcaagttttgttccacatatatgaagaatgaacagcacactttatacttaaaataaaaaaatgtttcactgttgtagtgtaaagaaacatagagcagtggccataaattatttttatttagggagacattcagtatgtagtcagtgggtatacatattggccatgtttgttttatttattcattcccttgctatatttaaactactaaaagtcagaatatctgatccttacacccaataagaaatagaatatcaactcaaataagtttcaatggagacaagaattcattcatgtgatttcccagtctaaggtgaagatgctaatatggtagaattgggtaggttttaaacgtggaagaaacctctccatcattcaattctactttcttctttgttagcttctttcttgagcaggcttctcctaaacaataatagcagcaatgaggttatattattctcacaactagcatttcaaacagatgggaacttttctttcctaggaaatcctgtgctatggggacactacttcaaatgtctaatattatttttatatcaatcccagtttcctctccttcccatcctcccatgccccccaccgaccctcatcatatccctcttctgctccttagaaagggtgaggtcttccaagggggatcatcaaagtctgtcacatcttttggggcagggcctaggcccttccccgtgacaccactgaatcttaacaaatgttgtattataggattaatatctttgcttgatataactatcaaattccatttgggctatttcagataacagatgctaaacaaatattgtcaataatgtacagaccaaaatcaaaagacagctttgctctctttaaacttatttgattttagactataatgcatttggactgttgtgataaggaaaagaaactgatataattgaaaatagagatgggaaatcaagtggaagtaaagggttttttcctttctttccttgacccaaattttgagtttaatttctccataaggaaccatgtcttccactttggcacatgtagtttagggagggttgacttcatcttctgttctcagaatggaccagtctcaagtctgaacagtaatggcactgcatttgagttattctctttgctgtttgtgattaaatacttgacaagaagcagcttacagggaagcaggccctgttttgggttcatggtttgaaggttcattccatcttaatggtgaagacatggcagcaggagaatgaagctgcttgtttatatgtgggtagatcagggaacagggaaagaggaatgcatgttctcaaccagtgctctccatctactttccccgtcattccaagactctagcccaaggaatagtgagccctacatttagtgtgggccactccctcaattaatttcctctggcagagccctcaaaggaaacccttggtgtctcttaattcagccaagttgacaatctaaattaattactcttctcttctactgaggatttgctcaggatagacatttgacgtagtgtccccatggcacaggatttcctaggaaagaagagttcccatctgtttgaaatgctagctgtgagaataatataattttctaatttaaattttaaaaattaaaaaagattcagtggtgtctaagataggagggaagatagattttacttcattgagatgcaagaaaaatctatgcaactttccagaatcctgatcgcagggtctatcttcccacacaatagtaatttaggcactatgtgcttatcctatctggggcaggaacccttgcaaacaaactgtctcatttcttacagagtaggtttgggtcctttctgtccaccagaaatactctaagttgtgtggaaagtataaatccagcactgtctctcctccaagatgtatcagtcctgtgaatctcagtagatttccaggtccctttgcggtctggggtcccagcacttagctgctgccctgggggcaagttctctctagtgcccactttgtgcatcttgggggcagacaaaggcttttccagtcttgtattttaatgagtgtcactactgcccttactgatgacctgcttgcaacttatcttcaaaagaagtcactcctcatctgaaaataggtgtttgttttgttttttttttgtttgtttgtttttttgtagttctggggattgaaaccagagcgttgaggatgctatgcagttttctcatctttatttccactagatttttgtctcacattcctggattaaatctgtctttggtgtttcttttgtatgggccgtggggggcaggtgtgtgtatgtacaggttgtgtgtctgttcctgtgtgttatttttcaagatggtctcttacccattgagttatgctagctatcctttgagttccagaaatccactgaccaccattatttcccaacaccagagttacaaatgtacatcagcacacctggcttttcatatggattctaggatgaaactcgggtccttatggccgagttggaagcaatgagctatcttcccagtgcttcttaatgttatgtaactaaaagtacctctgccatgtgtttctcaagataccatatttcctagcctccctctgattttgaactttgaagtttcagatatgttctgaaggaacaagcaacacctacttgctttcttggaaaacttatgaaactaagatctttaaaatgttcacttttcaataacatgcaggttttaagtgttcccataaccttcataaagcctgtgtggtttcagaactcttaatccatctggtctctgttttgtgaaagactccagtttgtcttatgccagactgtacaatccattcccccagcaatatagatacattcatattcactaataggaacacgcatgacctattctagtctagttaggatggttcattggagttttttaagagctagaaaataaaaggcacttcttttccccatacaagtaataaacacaggaacacacagatctgacagatgtcacataccatgagaggattgcatgactaaacttgtaaggaaaagcaactatgtctgtcaagtattatcccggagaactcagtatttcacagaatagtgggccaggtgggaactccacctcaacagcaaggctctgagtctaagataaatttttctctgtacacatatagccaaggatgaaaaagtcttgcctgggagaagggttttatgtcttgaacaccaggaaaagggagttatgtggtcagtttaaataatgagcatctggtatgggggggggttgcttaaagagagtattcttaatctgaaggtcattttcctgttgaaaggctgcatctcttccagagtaaatataagcacctgtactatgagaggaggatgctttcatttttaactgcatgcttgtgagttctgacattttttgaattattaaatatttaggttgtaaaagatctcaaaacagtcagttcttcaaacaaaaacaaaagcactcagcacctgaacatttttttcttgtgtactgaaacctcaagttcactttgtcaaactgcccaaatggctgtgaacactgccttattcactcctgctatggtttcatcagtggaaaccatgaaaaagacaccaagaagctgaaagtgtgttgtgcatatatgttcagccagccaaacaggacagaaagctggatggcaccatgtctctatgatctcccacataagttcctatttaatagaattaactgtcttggcaagaatcacctaatccattttaattctctaaaaagtagtattctcataccaaccttaaaataacacattcattcttaatttttggtggggggcaacttccaatgaagggggttttgcctgtaatctcagaatttaggattcaaaaaaaacttaaacgtatttgctataataaaacaatcatataattctgattatggtaagaaaataaagcataccacccctaatgagtgcttcacttatagaagcatggttctatatacagcctactttataaacaaaccaataggatataagaaaatcagatttctcagcaacttgcaaatttttctataaattgacgtaaagtgttttgaaagaacaatttctaattgtttgtggcttagctttcctgttcaactaaaggactatgacaaatcttttgtaacacctttccttggagaagttatgcatggacatttgtcatttgtctccatgagacagttttgagcttgaaggagacacatccttcatttttcatttttgaaatgcatttgtaaggtatttaatggacaaccagatctttttagataaagtgaagacaaagttttaaagtctagctaccttgtaatgattcaaagatttaagtttgaaatataaaatatctaaaggcccaaattaaagagaagtattacaaacaataggtcccctcttttagtttcttctgatttaaaatggggtgtctctgttgtatgccaggaaagaagaaaaggggtgtaaatttagctgcaaatagtatctggttctctacagtataggaagcaaaaagtttatctatgacataagtataacagtgagtcaccaaagccacaagatgctttattcatcacaaatgtcagttagaatatacttcctcttaaaatggcaaaatgcattgagggaaggcactcagggcttatgagtagtgtcatgactcctaagagaaaagagtcagactctggggcacacagctgaagatctgagtggggcatcagtagaggtaaaatgtgagaaagagaaaaccaatggtggcatgaattgtgcatatgagaaatatattttcagagggtcttgataccatgatctaaatataaatgcaaatgcacaattaaaaaaataagaagtatcttcaaaattaagactataggtctagaaacatacataaatttccttatttgctcattctttgactctattagcccactgagtgaaggtcagggaaagcaagtgtactcgtccctgccttggtctcagttttacaggcaacaagtagtagttgtggatcaaagggaactactgtgaaaagagcttattaaagcagagttgacagtaggtcttgttgttctgttctctgaagatgccttttgacagttgtgtcaggcagaaagcacacacaaagtgctcagggtgaaacttgtgccccatggcactgatgcagcggccagtgatgggctgcccacagccatggcagagggtcccttgccggtgatggtaatggagttcacagaatggacggccatccagttcaaagaaggagccagaagaaaagctgcagaagcagtcctgtggattgagtgaatgcagacaagagaaatgcatgtcaagggataatgccaccagataaaactctcatcttcaaaatccttgccagttgcctgccagttgtaggatttatcacaggtccttgacaaacaaaatctagatttatacatttgcaaaacagaccagcaaatgcccacaatgggtgctgtgtgctatttttcttttaaaaaataagtaaataaaactaacatggattcctcaccttggactagaaaccatctcactaagtagcagctagttcttttggggaagaatactctttgattttccctaaaagtgaaggtgactcagtatacaaaccccacacacaaagcactccgggtgccagacagtgttcatggctgaaaggtagttttccaacactgggcggttgcagccaccacacttaggtgagaacatggctaagaaatcttttcggcaatatggcttgttgtccttctcatgaaagcctgaaaagataaaatcaaagattcatagctgcagtctttgagtcttttaaagctacattagaagaagacataaggccattattgtcacctctcccaactttaggattcccatgttcaaaaaggagataatgcaggcatctttcagcattgaacctggatcacagcctaagtattacaggctatttctccttaacaccttgatacaaagtgttcccttggcctgaagttctgttcctgacgttgatataactgtgagtcatctcaaatggtcatcttctcagaggcataaacccagtccttgtttgtcaattcatctgtcttcattgtctttatagcacttaactttatcttaaatcatggttgtagtctaccttccctcactgaacattagctctgagagaaactagataccattggtcttgctgtaattatcccaataattaaaatattttaaaatgcaataacactaaatagaaattatctttgataagctatccattgcaaactagtcagtggaggagataaaattcacatcccacccctaacttgatcttcccatgggaagtgatatgtcaactaagtctgaatatcctaaccaaaactgtgtaaacatgagaacccaccctgtgcctcattggcctagtggtggtatgcaacaaagtatatttagtggactgctcaagctgcctactcaagaaacagtctagaaatcatagcagccggatcacaaaagtgtaataggacatcagggggaatgacccaaatcacataggtgctctttttgcctttagttcttgtcactgctagatgtagtttgcttcactcagttatgccttctctaaaaaaaagcaggagttggcaaaatttaaaggcccatggatctaagaatccaaattggtaattttatacctgttctgtgttattcctcttgctttaattttctttccttttcttttctgacccattcaaaaatttctagagtctgtttaaagaagtgactgtcaacccccacccccatttaagggaaaaaaaaccacccacgggcaggcatctttcttgcttttgtgtaaaacagtattctttttaacttcagcaagcttcactcacctgagaatttgttaaaatgtatattcctaggtccttcctgtacacctcccccgccctgtttttattgagtatatctggaatggtactggagattctgcattttttagcatgctcccaagtgatgtaagttggtatttcttaagaaagctgcaaggcatgctgcctaacctaggtatgaaccccatttaggaatctacagagcagttggtctccagagtgagacagtaggggagtaacatcctccatttcaacttgggtgagtctcaagaggggaatcaaagcagtcctccaaactcgatataatgtccccatacttagtaactcaataaattggtaaagttttagcattactgtcccaaaggctctctctggggccaattacctcaagagaatgaatgagagacactgacaattaaaagttaccacagagagaggaagagtgttttcactccagtgtgactgttagccactggggaaattaaagagcacctgcatagctgggataatgaacaattaaaaagaaagatgggtagcaccaaagacatagtcccctaggaaaaaatgctaaggaccaatgcatttagaaacttgagccttaaagagggattctctgaattgaagaagaatgcagatgaatttaatttcccaggaggttccatggtttaactgttattattgaaactctgcgtgtgtgtgtgtatcctggataaaagtcaggatgctatctaattaatggactgaccatacagcaggagacccatttataggaaagccaggaaaaagaatggaactataactcaaaaggaggctctagctaataaatgggtccattgccatgtgcctctattaatatatgttttcagtgtaatttcatgcttatttcaaatcacccaatggttaggaggaacccaactcaagaacaatgaaactagatatgctttccagtcaacccaacagatgaacattttttgtatgtaactatggctgttcttcttatctgcccttacctgtttccaggcaatttctatatcacaattatcaatggacagtgctctccaccctctccttataggtcctcaatgataaatgaaagtatgattccaccaaagtccaacttagggagtcattgagttcactacttttatagagaatgcataaccccaaagaagccacaccaccaggaagtatctctgaacatggatatcagcttccctatagctgcatagatggagtttcctcttccactaacctgacacacaaaatgtttttctagcacctctcgagagcatgaggccatttaccactagagccaaatcacattcagctggccaggaagtgaccttcctaagccttttctaggaaggaatacctacagccaacaagcccgattagggtcttatgcaagtagccacccctgcccacatggagagattggctgttatgcttggagaaaagcattctgttgggctggagaaatggctcagaggataagagcactgcctgctattccagaggtcctgagttcaattcccagtaatcacatggtggctcacaaccatctataatgagatccagtgccctctctggccttcaggaggtatacatgtaggcagaacactgtatacataataaataaataaataaataaataaataaatcttaagaaaaagaaagaaaagcattctgcaaccggcactgttcatttaatggctacttattaatttattctaattaattttcatatttctattgctactgatacaggcaaatatgatacatttcagtgtgatttagatttactcaataaaaatgttgcctaactaaagtgcaatgtagacatgaaagactcactgatttattaagtgcattgaacaagctccagcgcacaggcaaatcactacaaagaacttcgttagtacattaggtcagtgctactgcatctggctctactgcacagaaaagtacaagttggtactgagaaagtaaggacatctatcaataggagaattgagtctaggtcaaagagcagttagaatatgttagcaaaagtgtggtgtggaacttacagaaataagacctgaattcaaattccatcccttcaaccttctagttttactttagggcagatgtctctatcaataacgtgcttgccttgtaaacacaagacaaggaactgagttagatctccagatagaacccaccaaacaaataaacaggcaagcaagcaagcaaacaaataagtaaaccaggaatagtgacacacatttataatccagaactggaaagacagacagttggtatcttgaggctcaacagacagccaatcctacttggcaatcttcaggctttatctcacatacacacacacacacacacacacacacacacacacaaacacacacacacacaatgttatatatagtttccctccagtgcccacatgcatgtgtgcacctaggaagtgcagggagtcatcatcacctacatagaaaccctgaagccagctgcatgccactctgctgctctgaaaacaaaaggaacaataaaaagatgcaagactattcagaaaaataaatccttgcaaactgttacaaatgggtcacatagaaaagataaaacagggctggtgagatggttcagtgggcagaggggcttactgccaagcctgaggacctatgttcaatcaatgggaaccatgtgtcaaaagaagagaactgacttgcacattttgtcttctggcctccacatgtacatcatggcatgctcacattcacagacaaaataaaaatgcaagaaaaattggggtagtagaaaacatgaaaataaaaaagaaagaaaacctctcaattatggaagctgaatgtagtcttaagaattatgagtgcaaacagttcccactgtatattaaatataattgctatcaaattctatgttgaggcaactcaaaggcagtgacagaataaaaacatgtaaggaattatctaaattatgaaagaattacaaacaaaagagaaaggtggaagagatgccactatgcagtatcagtaaggggttctggtggttgttgctttgtttatttgtttattttttataatatcagttacaggagtggtggcatctaacttgggaactaaagctgaaagggatatccgctttcactgctggggtcctcagcatgagatttcccgggaactgaatgaaaagtactcctcaggtttagacaggactggcccagagtgtgaaaagccattggaaggtctgatgtcctacactgtcacaaaatgcaggaactatttgaaactattttagttgactttctgggtgctctagcatacctaagaaatgagtcaagctctccactgggagggcacaaggcaaattaagaaaagctggcaatttgacagcttctcttccattgacgccctcccacctggttaaactcagtgggtctcaacaatcaaacaaaatagcaacaaaaagtcgtctgtgtggaaagggtgcttatgagaaggaggctggaggaggtaaaacaaggcagatgggagattagagaggaaattatacttatcaggatgcacattacctgagtatgaaatacactcaaagtaagaagaaaagaggaaacagaggatctaaagagaaaggcagtaacagcagatgccaggagaactttaggaagaaagaccagaatgactgttacttagcagggaaaaagcatttcaggttggaggaggagggttgacctctcttgccagatcaccaatagaataaaatggagcagacttattagcagattcagctgactgttttgattaggatttcatggttctatcaggtaaattagcagtaagtatagtgaaaattaaactagaataaaacaattcaaattttaattcaaacgaaaaaatgattcataactttaataggaactatttgtgtggcagagggcgtagtatgtgtgttctcacgtttgtgtgagtataagcatgcataaataccatgattcatgtatagaggtcatgacaacctctgatggtagtccttttttcccaagtttgagacagtctcttctgtttgcattgtgcacattaggctagctggcctgcgggcttctaaggattctcctctctctgcctcacatctctggtaggaacaccggtgtcacaaacttgtgctaccaggcctagcttttaagcagattctagggattcaaactcaggtcttttcatatttgtgcagcaagtgtaccacctaccaagccatctcctgaggacacaatctggctttaaatgatggattttcacttctttaaaaaaaaaatcaatttaaaagtagtaatgttagggaagggtagagagatgacacggaggcatgaagttggcttgtaggtggcagtgctgagaactgaaacccagcagagaccagtccccaaggagcagtgctgctggccttcccatctctcagcctagggttgtttgtagtatcccctcttaccttctgcaccaaacacctctccacagtgagagcagaaaaagtgctctgggtgccatgtctggttcattgctgtcagaactttctggaaacaggacacatggaaaggtattagaaggcttccgagttgtaaaacatgcccagtgttcttagcaagtgatcagacacttcgtgaaagctggcagggtgggaagttactcacatccatgatgggagccgcacagtaggcacagcgtggagagaacaggtggtggtagtcattggaacagtaggccaagccactccgctcaaagaagggactggagccaatctcctccttgcagtgagtgcagatgaagtgctctgggtgccaggattggcccagagcatggatcacctggggatatcacagagcctgacatggcagtgaagcagagtgcacctccagagggcactctgcatgcttccttccatgtagacagcaccttctgagttatccaataacaaggcccagacctaggttacactaaggccattgagaccacacttcaaggatagtaaaaggaatgtactatcctgaccaatcaagaagccaagaagattttacacctctcaaccttccagagtccagttggaaagccctgtgctgtggattttgtgataatgattcagagcaagtctcagtatctctgtttaaagttacatttagatggaattgaaatgaataaattcaagtccagaaatgtctgaagagagggagcagtgagaaaagtcacctcagtaatagcagtgaaaaaaaaatgattaggaattcaaacacagatgttagacagtcctgaacttaaatgttctctttgcttctttcttaccagaccttggtcttgccagccaatgtctctgagctcttgattttcttgtttttgcaaaagacatgataataaaacctccttaaaaggttgattcaactactaaatgcaggaatactcacagaacacttagctcgggttccagaatgctataagcagtcagaagttgttagcaattactaaattatcttagaatacaaagaaaaagaaccattcttggacacacacatacacagagagagagagagagagagagagacagagacagagacagagagacacagagagacagagagaaggagacttattggatcaacatcctagatcaccccaccttcccagcaattggcttctggcaggaagcacagtggcccttgggcaccgtggcaatcccaagatcttgcagttcctgttccaaacccccaagcattgagtccaatgatgccttgtggtcttgcttgtctggtaagtgtttcttgttggcatctgctgtcactgaaaccttggacaaggaaagaaccataaacagaaatcagcctgtggcacctttattcattttggcatttgctatacaacctatcccttcatctatgacagctgatcttgtcatcacctaatcttccttcaaggaactggagacacaaagaaaacatgagcacaaagaaaacacttatttccatttcagtataaattctttgaacaaaatgaaatctgataatttgtcatttatttacaaatcttctgtgtgccaaaaataactgagtgtatgaagattataatctttatagctcttatagtgaccccaggtgaaaattagtcatctcttccttttagtcatttattaattgccaagcacctaatttgtcacagacagtattctaggaacttgttatgaagcagtatacaagcataccgagtctcttgtctcatgaaattttcattctattagtggcaggtaatcaacaaatctgacaaatgtttcatgtcagataaagaaaagttgtatgttatataagagatagttgtgatggagggtggtatggtgagcaggaactgatttagaagaaaatgcctctgaagaagaaatacttgaacatatgaactcaaggatccaaaaatactgacattactgagatggtcattccaacagagaaagaaggttcaagggatgaaaccatttggcacactggaagaaaagttaaaagatcaacagagccaaaaccaaagcactaagattggacataccggagagtgtgaggagaaaatcaaaagtcacctaggacctttatggcaaaagtttgatttgtatagtaaggtgataagtgtgactgaagggcgacagatcagagaatgagcgaagcagattacaatactttgtaatgatttgtatcatgtttaaaccagtgttaagtgagaaggtagtgagattgcatttattcaaaaatagatccaaacttattattataaatcactcaagtcagttttacacagacacacagcctaatttttttccctcatcatttcatgtcctttccttcatggcctgttgagaccatctacctacctaatgtttatctgatcaggtagatacaatggttctccactgcctacccatcaaattatttttttctctctttttattattattaattcaagttagggaacaggcttgtttcacatgtaattcccctctccctctccctctccctctccctccctttaaccccatcaaattattttatcatcaaacatatcttcacagtttcacacccattaccctcactttgtcttcccaatctcgttttctgtgtcacagtttaaaaagcattcttattgaagcaggcaggttcccaacattctcctgggtgtttctgctaatatctgccttcaggtctctagttattcgaccttcactgcctattatactctcacccattatgctcatttccattcaaaaaattgattctcaaacagatttctttcctcccctttatataatggaagttagtgtttgagaagtacctgtccaaaggattaatgtccagaggtaccaaaacgttactaattttacatttgaaaataactaagtgaaaatataaatatattctccacatctatgtctatttgcttgcatattccaaaatacttccagacacatatgcaaaatgcagtatattctgatgacctgcagggggcagaatgagacaatccaggacaaatgatatggaaacagcttactgtaaacaatcttgtacttttgattttgtgcaatgtatatgtatttttttagttttaaaacacatacactttaagttaaaatttaaatacacaaagacacaccttaacaagaaaacactgcaaaaatgtcctaataagattgcttttctagcatcatcaaatatgcaacacaagtcaattcactcaactttagtgcagaggctagctagttatacagtattagccatcagagaatcttgttttgtccctccaacaactatgtgttacttgctcactgtgtgataagtactatgtgggatattgggaatctcatactgatacagtacctgccctcctataccatacatattttaacagtctcccttaagcatatcatactgatttcatggctatacatcttaacttccaaccagattttaaaagattggattctctgtattaagaattctagatctgtgcccttgataaatgcttaagactccttatctggttgctactctctgccaggacccatgagtttgcccttttcactctacagacaagaaaaaaaagggcaaatgttatctcagtatggtctcagaactcatccttcctactttggccttccttgctccctgcctcagcctgcccactggcctctgtccagctcaggcatgtgtccttaatagaccttctgtatcatcatgccttcagtgcagcctttgccctcagggatctcttcaactcttatcattatgtgtccagacctctcctattcttcagtgtccatcctaaaccccatcaacacaactgctctgataaaatccacttggcctatcaaaatccctagagtttgctccactcattttggaaaatcacaagccttttattcattgcagattttatgactggctatatcaagaacaccctggtctcctccagatcaaggcctataccacgctatctttcacatccaaatgagtttttccactgacttaaatataatctaggaaaatgaacaccaccttagaattcccaagctggggatgaaggactgaccgctaccaatctaactggtgcctctctggaacccagagactttattctccatactgcacccaccttggcctgcatttcactcaggtgggccatgagctcatccagctgagcagctgctgaggttttaggaggtggtactgattcttttggctcttggacctcactaaagacagaagaaaaaaagttatactaacatatgaaaaatcaaataaatattaagtcacacataaagcatcagaggatacaattttacctattgacttataagaatctaaaaaccagagacagcaagtattttaaaaatagctgccattataaattgttgaataaggactctctgcattatgtatctgtttcctcttggccacctaaatagatgattgatagatagatagatagatagatagatagatagatagatagataatagctgtttgcccttgggagtatgaagaaaagtgctggacatgtctccaattactacagtccaagaaaccttagaacagagctttaaagccataggctgtattttaagagaattttttttaaattttaagtcatacataataaaaagttttaaagttaaccaagtaacctgaataaacattcctctaaaaatgactaacagtcattgggcatacaaaaagatgctcaagctcattaattaccaggaaaatgcaaacccatattaatatgagataccacattatacccatcacagtatgaggcaaattctggcaaaagtgtagagaagtgaaagaagcaatgtaaacttcagtgttctgcaggttggtgtagtcacgatgagagcatgagggtaggggacagggagctgccagaatgagaggaggaggagaggcggggagaggaggaaatgaaggagcataaatgttgagttgggggaagaatagaggagagcaggaggagagataccaaatcagagggagccattataggtctgaggagagatctggcactagggagatttccagggatctacaaggatgacaagaactgacaatcgaggcaatggtggagaggataacctaaattcccttcccctataatgagactgatgactactttttatcccatcctagagccctcatgcagtggctgatggaagcagaggcagacacccacagatatacactgacctgaactctggaacctagttgcagagagggaggaatgaagatcaaaggggtcggtaccaggctggtgaaacccacagaatcagctggcctgaacaagggtgagtacatcgaccccagactgctgtctgggaggctatcacaggactgaatcagacccctgatcatggatgtcaatgatgacctctgcactctagggggcctctggtagtggattagtattttttcctggtgtaagaagggactttgagagcccatcccatcccacatgaggggatgcactcttggtctggacacatgggggagggcctaggcccagcccaggatgatgtggtggactttggggagccctgttgagggccctaccctgcctggggagtggagggtagatggggtaggggcaggtgggggttgggggagggttggggggaggagggagaagggattggcatgtgaagcaagcttgttctgaatttgaactaataaaaaatttaaaattaaaaaaaattataggctagaacatttcccccaaaaaaattatgtttaaaatgctgggcatcgtgacacacatctgtaatccttgcaactgagaggcagaggcaggcagatctctgtgagttccagaccagccaaagttatacagaccctatctcaaaaataacaacaaaaaaaaattccagaagaaaaaggttgtcccaatataggtaatgttttataaaataaaggtaatgaggagcaagcagttctcatgcaacacttataaacaacattaattaaatgtgtgcaatggtaacagcaaactgaatgaaagagtagactaaaatatccagaagctgacccctacacctgtaaagatccagtatattgtgtgagacatttcaaagtgtcagaaatataattaatggacccaatgaataaaaatctgtgtagaacaaaataaacatttagcactcactcaacatatcaaatacatgaacaagtgagtggaattgaatatataaatattttaaaatattaaaatattagaaggaaatggataactttaaagtcttagagccattaaggcattttaaacaagggaataaaactaaaatgatgggaactatggagatagcttagaggtcaagggcactcactattcttgcagaggacctgggtttggttctcagaacctacaaggcagcttacaactccctgtaactccaatttcaagggctcaaatgtcctcttatgacctccatgtacaccaggaatacagatactacatatacaaaaatgtatcaaaatatctatatacataaagaattcatttaaaaataaagaaaagattgatttaaaatcctctggaatgaaaaaaagaaaatattaataaagtctatttcacaaaattattacagctaaatcatattcaaaatgtttgtaaatcttctgtaaattaaaaaaacaaaccactgaaaacatgaactacattttaaaatcgggtttaagaaagataaattttactgccctcccaccttgttacctatgctcagccttaatgcagggaggagaggcttggtcctgcctcaatttaatgtgtcaggcattgttgacccccatgggggacttaaccctttggaaggagtggaagaggcataagcttggggagaggtgaagagggcaggaggacatgtgggagggagaactttggttgtaatgtaaaatgaaattaaaaacaataaataaataaaataaaaaggaaagataaacttaaaggtttattgttgtagatatgagtagaagttcctgtggtgatatcgtgtttatactctaacaaataaagctttccttgaatatcagaaggcagagctagccgctagctaaccatagaggtctgaaggtctgtacagacagacaggaagtgagaaggctgggcagagagaggaatataggcaggaggagacagaaaatctgttttcagtctgaggatttcgtagaggtaagagctctagtggctggctgctctgcctctctggtctttcagcttctaccccctaatatctgactccagggttttattattaagaccaattagaactcctgctacaagttccaaaaggaaattgtgccttcaaccaaatcttcaaggctggttaactgatttgaacttcaacaattgtagagaagttggaatgttgcaggtctagagcctaattgaaatttatttgggactatatttaggctcataaatagtcattccttgtccacataatatcctgtgactaacagataaaatcttaatatccaccaccacaagagtaagaataccatcagattagcactgccacctacaacggaggtttcaaccctcctccttaatgtttctgctaatatgtttgagcatttcttgatttatgactttccttgttcttttactataaaaacttgacctaagttttactgtgctgtaacatggaacttgggataacctaaatctgtggtcacaggccatggccactcatattgggcttcagaataaactatctcacatctccttttaagtgagagttatgtttcacactgacatataaaatatgtttgatcccatcaatctttaaacaaacaagttaaggtagaaatgaatttttaccaactaatcacaattttaaaaacttgttaatatacagttactcaagtcaagattatatgcatgcatacacacacacacacacacgcacacgcacacgcacacgcacacgcacacgcacacacgcacacgcacacgcacacgcgcacgcgcacgcgcacacgcacacgcacacacacacacacacacacacacgcacacacgcacacacacacgcacacgcacacacacacacacacacacacgcacgcacacacacacacacgcacgcacacacacacacgcacacactgtaggtgttatacagatttctaaaacccttttcaagatagaacctatcaacagttcaaatataaataccctctagagcaactttacttttaaatctgcatcctacagaaaaactgaaacataaactaggactatttggggagaggaaatgaaatagccagagaggaagacagaaatacttgaaagggaaatgaggcaggggcagattagaacaaagcatgtcattatgaaaataccataatgaaacccactaactttgcatgctgtggtggtttgaatgagaagtgctccccatttgaactgggtccctacttagtgatactgttggaagagattgttgggaggttcagcttggagaagaaattacaacactaagagcaagctttgagagtttatagcctggctgtccagtttgctatctttgctttgtatttgtgtttgagttttgatctcccagcttcctcctcttgccaccatgcttgctgcctactgccatgcctcactgtcatgagagacttttctctcctcccagaactgtaagcccaaacgaattctttcttccataatttgccttggttatagtatgttatcatagcagcagaaaagtaacaaatacatatgcaaatttaaaatcaattcaaagacaaaaaaaagaaaatttagggatgtgtgtgtacaaatatacatacatagcaagagaggtgtataatgaaagaagttcatcacaatacaggattcttgagcaaataaaaagtaaactaagcaaatgaattatgattcatccaatttacagaatagcatgcaattgcttaaaaatgtacttacagacttgggtaaattaagaagtaattctaaaatatgttgttaaatttatgaagcaaggcccagagcaatgtgaaaaatccccttccacagcttctggggctcaagttctagtcttgtgcttgcatggcaggcactttacctgttagcgaatattattttaatatgtgtgactttaatgtgctgcatttgtttaactttgtgtagctgtattactgtgtctgtctaaaatgcctggtggtcataataaagagctgaacagccaatagtgaggcaggagcaaggataggcagggctggcagacaaagagtataaataggagaaacaaggaaaacaggagtaatgagagaacaagcagaggaggccatcagggatctgccacccagccaaccagtcacccagccagccatggagtaagaagggaagtaagatatacagaagcaaaaaagataaaagcccagagggaaaaagtagatgggtaatctaaagataagaaaagctggcaagaaacaagctaagctaaggcagggcattcctaagtaataataagactctgtgtgatttatttgggagctggtggtgggcccctccaaaagagccaaagagtaaaaacatttcaaataatattaccagctgaggtatcgccacagctccaaatgtagctttttatctgggcctgcttattcataaagcctcctaacctcacagttgtagaaaatgtgttcatgttcaaagaaatgcccacactcttttaaactagagtccatgtacagcatataaagagaagggaccattgtcaagattctctagcattggctgactcagcattatactgttctacatggaaaatgaaaacttaaagagttgatgattacaaattaaagacccattataggacatattcttgaaaagagagaaccctcacattagagacacctgatctgtttctgccttttaatcgtagcaaaagtgctttgttacgtcatgagccacaagctactttgtgacttggagattgtaataatacagatcacaacacacacatagttgaaagaatgtactgaatgtacacttcccaacaaaggggcttcattgtgccgagttttcctttgtttaatcctgttatattctgtggctgttcttccacactaccagaactgctatttttgctcatgtaatagatatgcttacgaactactgccatattgctatcgatgtacagtggttagaaacatctcagtgctgcagtcacagttgctgctaagcacactttcaaggtttactgggagcaatgcgcagctcacttatgcaactcagagtatatggtgaaaacagatgtgggaatctagcttctgagtgtagcgttctgtgttggcatgctactgttcatagctcagaattacaatcacctaggaaatttataaaaagtcccacatagttatggatggattttatatcatcctcccacacatatatccactttaagtatggcttggaagtgaataatataccagtaaaacacattcaagtccagataatataagcaagtttgagtaaaaaaaaatgcaattaatgtacagaatcaattacacagatagtgagagagctaaaaagcaaaatggaagacactgagactaccagaaacccacagcagcaagtcatcgccatcacccctaagctaaaaagacaacatgcatgacattgtcatcagagaccagggcctctgttcagtgtgctggaacgacagcagatagtcatgctcagctgacagagatgcagctgctgataaaacactggaaagtcaaggaccaggaccagggcaagtgccctacattttcctacgctgctgcatctaccagtctctccagcacttcttgttggtcacagttcatgacagccaactgtcctggagtctggaaaatccaaccaattccagatatactggaaaatgtctggggcttgcactggttttcatgttacatgtttgagtattcacatgtatttctattgacatcttaagaaaacacatttgctgaggcctcttgaatgcgaacactgttttcttattgtttgttttttaacgacaacaggagggtgaggacaatggagaaatgttcacctaccacttcctgaatctggaataaataggtattgtgtattattaaaccagcttcactcccaccacagtagaaagtgatctccactgggaagtttttaaatgacttcatgtacctcaagtcctttccctgtgttagcctcccgtgtgtgctctgtgtgctgtgattctgagaccagatagtgcggtggagcactctgttccagcacaaacccttaaaaaagaacctaatttgttttaatgacagtatgattaaagacagaaaccaaagaggtggcctttttctgtttcctgtctgttttagactacagattctctttgaccaagacaaatgatttaacaagtgaatctattccatgtataacttttactaaagagacacccttccaccacctaaataaacttcaagcagacctagaaagtataagtatacactcatttgtctttgatgggcccttgttgtcttcacgcagccctggtcctagcattgacattgttggacccttgcttaagtttactcaggtgtgttttctctgttgcatgatacctggaacttaagtgccaaaacatctgtgctagctctggaacgttttatgattttcaggtggtaaagaaaatgtagagactacctccccccaccccagcctggacacctgtctggaggaaagataccttgagaggctgccaagtcagcttcagagggttttgcctgtgttcaaaggctatgggaaggacatactatggaggaagtccaataacaatatttaaaaaaagaaattattgcaaatattaataattacctgataaccttaaattttgaaattatttattagaaaccaaaacttacctgtagacattgggatcctggatattggtcgtatacacgagctgtacctgagacagaagtgacagaaaagagcaaagaatgacatctgtattagaatggtggtgcttatcaacatggagatggaggggggggttccagcttccaaaggggaaaaccagaatggcatggtagtacactcctgtcatccaagctacttgggaggctgagggaaaagaagcatgaatatgattttaggctgggcacaacattaagaccttgtctcaaagcatatagcaataataagcaataaataactagtatattgcttaattctttccaaaggcagaattacctcccatcatgcagtgaaaagccaaattctaaacagagaaagtactaccctccctgctttaaaaacaaagatatgaagagttgtatcatcctcagttaggaagcacagaaacaatatggtgacttggggaaagccctttaaacacaatggtgcctaggggaaggctattgctcaaactttccttatgaaaagttatggctggacagcaattcatctatttattcactcaacagatatctgctgactaactgatatgttccagatcttaggatgttatacccaaaccacaacataaaacaatcgcactaaaaccaaatagtctggggaatgaagatgtagttcagttagtggagtgtttgcctagaatccctgaggtcctggagtctaatccaagcactgtataaacgtggtgtggtggtgcaatcctgttatgccagcatttgggagctggatgcagaatcaagaattcaaactcatccttccctacacagtgagctccaagtcagcctaggttacttgagacccaacttaacaaaaacagaacactccagagtttacattctatttgcaagaagtaatcaaggagttaatcaaggagtagaaaacaagagttgtggagatagtaacagttataagtgcactgatagggaaaacccactaagtagacgacacttgagcaatgacttacatgaagtaagcaatcaggtatcagggtaatgtgaactgtgtgcaaagaatgagtgggaaggactgttgagcaacaaggaggcctgtgtggcctgtgcagtgaagcagggagaggggctagatttgcagctggtactcatacatttactcagctcaaagtgagatacttaaaggaaaaggggggttggaattaattcatggtatttaatctctacatttaaaaatttttagagtgtgatagagggggagagagagattgtgtaacctactacagaactcgagctcccgtctcctactcatcagcattggtattacaaatatatgcactacagttccctaatgaggtacatattactagccaaaaaacttggttgtgttgtatttgtgggcctataaaataaccctaatcatggtcagggtgtggtggctcaggccttcatgcctttaaccacagcacttgagaagcagaggcaagatttgaggccagcctgagttacatggcaaatgtctcgaaataatcccaatagaaataacaataattgtgctcaaaatctcttttccttatttttttttttgagtcagtgtctcctgtagcccaggccagcatcaaacttatgtagctgaagctagtcttgaagttccgtcctcctgaatatgctgggataacaaatacaagtcaccatgcctggagggacttattttctacagatttccccaaaataacttaaaacatcatatagccatacacatgatgggaaattcattaagtgttttttttattacttaaacatttaaaacagcataagaaaacaattaaccaaaacatatagtcacatactttaatcactaacttggtaattcctggttctaacattttgatttaggaattttcctttaaaatgctgatttttaaatatatataatactgccacttttttaatttgtaatgttctccaaagctgcatgttatggttaggagatctgagattgatgttatcttttacttgggctcctctctagggcatagtgcttttagtaggagatgtgatctctatgctgacaaacctgaacactcagggcacattctgccctgtgaaacatattctcaattctggtttctctactaagatatggaaatacattcaggaaaatatcttcctttaattattttcttactgcacaaaataatgggcttcagtagggcattttcatacatgtatattaatgtactttaattgtttttgccttcccaccaccctccttggtccccttcaccctccctctggttaattccactccacaagtctctgttttgtccttatatcatatatagaatacataaaagatatataacataaaatgcaatatttgttttctgtccatcccattaacctctcgtgtattctcgctggcccccaggccttccgccttcctctttgtccaagacactattcccatgtgtcttctcttagccaatccattcactctttctccattaacattctcataagcccaaactttgtagttgtctgtttgtgattcttttaacatattttgtaagggatgggtaagagcaaaatcattgacttccataattttattacattttggtttataaatgtatcaaataacataaaataaaataaatccatcaaagtcaagattttttagaagcacattttcaaattaagcaattgagctacatgagctctaatctcttggttttttctgggagataaaaatggagctgcttccttttgttaaactcaattgtatatgatttcagattgttaagaagcactttttcattctatattggttgagtgatttgattacagctctccagctgattttgcacacagtgcaacctaagctttatgagaagatggtgggacatttccaaaacctagagaataagagccaacacatagagaaaatcagtataactgtgcttagattgtatttcatgtcactcctaaggaaaaaaaatgactagcatgacatttgccagtcttgataatttgagttttgatgggcagaatgctgctgtttgtttttatgaagtcaaggattctgtgcaatttacaaccagctccaaattcatttctgctctgctggatttaagttggtaagaacacgttaccatgatgctgtgttccactaacagtctgttctcttactcttacaggaaaattttgctatcttcaatacttctccaactcactgtgctggcattactaatgttgcttgtttcatttataacaggaaaattaacttccaggaggttttattttgatgctgtatattgggtgacaaacaaataaaagaggttgatatgttctaattgacacctctgatggcagtgatttaagactggcattatttgatggttctcaaagagaatctactccttccactttagttataagcagatggaaatgtggaattgaaaatgagcaaaaaatgtttccacgagtggttttctagaagtggaaacgcgtatttcacagtgatctgcaaacacatttcctgcagctgtgcatgtactgttcttcagaatatgcttctgattgaagtcttaaatcgaaagtacatgctagttcttcttcaccttttttgtctcctaattttcagggggacagtgatacctctcctcattcccactggtgactagaaaacatcaaaagaagtcttatgcacattaacacagtccttataacgccttcgagaaaataaaacctcaagattttgtttctgttttgctttaatccaactgacaaaaggttaataatattaagatgtcttgagtactatgaaaaataaaacacttggaaatttacaattacaagtacagaatgctttcataacattcacaatatagtatttgtgatgacaagaatactaaattctatttcttgaacaccatctttatgtcactgagtatgatttccttgtcacttactgaccccagatgttccagatatgcatcacatggcccacacatagcaggctgtgactggcagcataccaagtggccagcatatttcctctgctaccacctaagatgggaggagttagctcatgtttgcacacttacacctcatagtcatctctctgaatactgtcatgacaggatgacgttactgaagttttgtctgaacaagatcggggagagtcattcttaatcacctttggagttagtcataatcatattgctatattaatgcaaacactaatcataaaacttcaaaagcaattgaaactattacatgaaaggaaatcaatgagctgtcgggaaaataagcaaaagctcaggtctcttgcaggtaaacaaagatgtggtcatccacaaagatcagcgccaacacagtgccttctactgcaaatgggatgggaaatcacagggagagtgagagcagaagactgccatgatctgtcctaagtcaggcatctaggaggctgctttgtgataatcaagtgcagttatctgtgtgggaaaacatgaggaatcctatggctgtagtctaagaatttcaacaatcactccctgaatctattcagccgaaaataagaccaacaaaggaacagttgtacagtcaccccaaaaagactagtctaaaagatgaggttatccctgctcttactgggtatgactccagtcacactgtaacatggcacttctggtagccagggagcaccatcacagtagccagcatgaaccaggcaatattctgccagaagaagagagtttcaaaggcatactctatggtcatgtcctcaagtctcctctttccaaaatcaactgtttttaatgttgaaatgatactttttttctgtcctgaatatatgttgcctccttaatataattttatatgggaaacaattttcagaaatacagtcgaatgttgtctataacactgcaatagatgaaatgttaccttcaaaggacttgtgtgactctgagatgacaaggtctttggagttttgggaagcttgctctcctgtttggattgctgacccggctgacaagaaactgggtttgaatattcatcactgtcctggagggtggagcgttccaattcctccaataaggcatctatatcacaggacacaaaaggagcttaatatagactttgtgagtctccagagttattttcttcttaaatattctcttcttgttttggataacaattttcaaatacctccctccatacctcacacttcaggagtgtggcatgtcctgggatatgcctgggaagattatggtccatttgatatttcctatggttgtattccattatattggctctctacaatctggtttcctataatttggcttctaggtattgatttttaaccagttgggtagaacacacacacacacacacacacacacacacagaagaaaacacatgtacttcatattagaaaaaataaggtttttcaaaatagtccaagaagcaaaattcttttttttattctttcatacaattcatcccacacagcagggaggcaaaacattaatcctgacttttttagtctaatatctgaaggattagtgcaataatataacaagaaaaaaactgtcaagtattaatgtttgttgttgttgttgttgttgttgttagtcagtttgaatgtagaaagtaaaagaagttgaaaaaaatattgtacaatcaagcaagatgtagcaatccaaataattggacctcatttgctgttttcttgggaaaatgccaatatacttcacaagcattttgctagtaccttcttgttataatgtcattaatcataatgattaatgaaaattataaacccataccaatcacagtgtatgaagagtgttgtccttacacttttaggtagaggacatcactgtcctcatttcatatacaggagaaagagtgcagctccaacaggctcttgatcacagcatcagagctccaaggggagctatctgagccccaccaacatgtaagttggaattgccatcatcaccagattgtctgagtcatcttaagcacagcatgttctcttcatctacataatgaagcaactggatggaacaatatttttcaaattgtaattcaagataattttgtatcttcttttgaacttcagtgaatttttaaaatatatgttagtttttataagcttgcaaagcattagattgtgtgatttctaaggacccgcctatctctgaaattctcaaataaagaaaatgaacttatcacatcattaaaaaacaaacatgttcatgcatttcatactaggagaggacagggttttggtctgtctgttttttaaattaattttaatttcaattaaaaacaatcttgaggatgggaattagagggaactgggattggtctgtccagttcttaagagaggctgccacagaacaacttggcctgaaatttaccaagtaagccaggctggcctaaaactcataatcttcctgcctccccttttgaggaatgtctcacatgggtgagacatcatggagcagctcaaaactgtcttagccccactgtttttcctctttacgatgctgaacccaggaacttattatgttaccaaagtatgttaatgcgccactaagccacatgccccagattaaggttgagtatttctcaatattataaggaagatctaatcgcttgtttttacaaaagaaatcttctgtagaactttctcaatcatccatatcacaaagttttgaccttagtacaccatttcagaaataaccgaactggactaatctctttaggccggactgtccttcaataaataaactgacaagaaaaaaaaagaaagaaaaataagggcaaatatataataataagagacatgtaactaattttaatttagattataacttttttttttttttttttggtttttcgagacagggtttctctgtgtagctttggaggctgtcctggcactcgctctggagaccaggctggcctcgaactcacagagatccgcctgcctctgcctcccgagttctgggattaaaggcgtgagccaccaacaccctgcaacttaggtcataactttaattaaaaaataaagcagtcaagatagtatttctgtgagattttcctgaacttaccatcaaaaacttaaaggcaagtacaaaaatacatcttgggcaaatcagaattcagtgtttagcatgagttttatatgcataagaagacaggtgacaaaataataaattaataaaatattttaaagaatatttaacactatatagtcaataatattaaatactagcattttagaaatttgaaaatattaacattaaagtgacttcagttaattttagctgtgataatgtcatctcttgacattgaggagccaccattaaggttgttagctattctgggtatgacagtgttagtgtggttgtctttataaacattacatacttatatattaaggctgcaatattttacagataagaaatgtaatgtctaaagactcagtttgttgactggcacagagtccactgagcaggcacccaggcacaccttggtacacacaagcacatacaaagacaggcacacaggctaccaataggcagacacaggcctacgaaggaagactgcaaaggcaaaaggcaaaggggaaagtgcaggccccaaacttaaggctttaattatataaaatctcacaaaagtgacatagttattgctttgctccatgtagcttctgggattgatctatctggggtgttaaagaatgaagaaaggacaaacactaggacacacaggcacagaaaaactgagataaagctagactgggctctctgatggagaagccacaacaccctggaagattggcatctttattttaaaaagaaagaaatttaatatcttaagtttcttgaaaacaatataaaggaaggttatcaggagctgatgattgtggcttaggttctgttaaaatgttttctatacttttgtatatttttaaattctctacaatgaaaggggttttctttagagcaaaaaaaaaaaacaataaagcaaaagttttatctcgaattttattagccagactcaactgtgaatttcagaatcccaatattttattctacatctgttaaaatcgagacattctcttttctaagctttgatccaatcagaagtcagaggcctttctgcatcaatagaatccatattttttatattaaagactatggtacagcattcagcagaggtatgaagcgaactttttgttgttgttaaattttatttaaattaaaaacaatcttatttcacataccaatcccaatttcatctctctcctatcctcccatgcccccccactaactcctcaacccaccccacccccatccacgccccagtgaggtgaggcctcccatgggggatcatcaaagtctgtcacatcatttggggcaggacctaggccctccgctggtatgaagcagtctttagaagcatcagcttgataaatctattaaaactctcctttctgctgctgagttaacaggactttcacttcccatttccaatgagtgaacatttcaccactaccctgaggctactctttttgcttcacgaagattctgtaatttaaattagatgactaatttcagtgtgacaaatataagattactggggtgagtgaaactagactgaaaactgcagttcttcctagtccttgacctgtggaaatcaagtatcaaccttcacctgcaagtgaagtctcttgtgggtctccataggttataatatgattgaatccctaaattgcaatgctttaggtaaatgttctgggtgaatatatgctactgacatccaaagcagtacagcagagaggaagcgtttgcccacctgggccagcctattcttgatacaatttttacagatgtaaaaagaaaactccattccaagtctttgggggtagctagtaggtccgttgctgttttttaaggcagggtttcattcgggtcctggctaacctggaacaagctccagcccagcctggcctcagactctgggcagttctccaaccgagcctccctagtgctgggatcacagttgtaaactattgtgcttggccgatactccctgccttttttttttttcattttgtttttttgagatggggcctgactgtatagctctagctatcccagaacttactatgtacatagtctggcctcagattcatagagatttgactgcttccgcctcccatatctggcttttttgagacaggctcttaggtagtctaggcaggcctcaaattttctaacagccaaaaataaccttaagcttcagaacctcctgcttccacctctagagcactgggattacaggcaggcaacacacacagatggtgacaatctgaagagacagttgaggtgaagccatcatcagtcctttgacatgtagcaacctggataatctgcacagtgggctttcaaagcggcacaatttctacatctcagaacaaaatttccctaacaactattctactcagaaaatataaaagtatacatattttttaaaaatgttattactccattggccaccagaacaaacatacttctaacagaaaaacaacttataacattgtcatttaattgctcttagtgtcagaagctcctgagagtgaacaacatattttgtctttatttagtgaaaaaaaaaatacctatttcagaaggttgctgtaaacactaaactgatcaatatattttaagttctccccatattagttatgttttaactttttgaactaaatttgaataaaaaaattaatatccataagataaagcaagataagatcctctctgaaaaaaatagtaaaattccatggagaatgcaaatttcttcaatacccacacaggacatgcatgcatcaaattctcaaagagtaaataaccaatatcatatagaaaaatctggattctacaccaaagtccaaaatacagcttttaccacagtatcaaaatacattttttttgccaaaacagttcaacatttattaaaaaacctctgtttttctgtaactaatttctctccttccttcctctgtttctccagcccttaaaatacaagcccaataattctttttaaagacaatgtacaagctatgtattttgttattgctgccagttttcacatagctacaaacacagaggcaatgtggaattaatacagcttaagaacagagtgaaagttagtaacttgatgttgaggatactataaataaacaaataattaaatcaagttgccaaggtgtatgaaatgaatcccaaggaggcagactttacagctccaaaactttgaaatctgtgatttctgtgggcatggcagctgttgacacttccactgttggttacatgacctcagagtggaagtaaggactgtatttctggccagcttatctgctccttcaagatttctccaaaaaaaaaaaaaaaaaaagaaccactacattaatgacgcctctgtaaactacagaggaatgaaacccttctggcctgtctgcaacctctacagactctaccctgcactgttatgtcattgtccttcccctatattccccctcctgttttctcttcttttctctttcctttcttccccacttcccttcattttatttcctcgccctttcccaaccttattttttctcctagttccacagtcgcctagctgtggagccaccctatgatctccaaggggaaaaccactttcaattacatttccttctaaaagtgcttctccgggtgtctgctgtgtggttagctctgtctactatgcctctgcaaacagggaccctagagtttcccccaacgatcatagttcctcctgcctcactctttttttgaactggggacagaagtaaaaacaaaatctctcagcactctcctcggttcagccaaaactatcatcacacatgggatggacagtaaccaagtgtgcacttccttagtgcatcttccaaagcccctcactcacccagctcttccattgtcttacacccagaaggctctagtcctgacgattgtgaagaactgctttggcatgtggtgaagaaggggaccacaacggaactgaatgagacagtgcgaagcagcgtctatgaccctttttggttcctgtatttgcttagcacttcctcacttttgatttgaatttctttcttttcttttctagtagctcagttgttttaaatagtgctgtcagagaaagacaggttgtgcaagactgaggttttgatgctacattggccagtggttataaaggatgaaagttgatttctcaaaatttaaaactcctaccacatacaagagcttaggttttccaagtttaagcatcccactgcccactcttggcttcttttttttttttttttttttttttttgccccacagatgtccatggaagcataggctccttccttaaaatttctgattaaacagcaccaacttcatttcattatctctattttcttattcagaagtcatgctgacctgatttcccccaaaaaactgtagtttaaaactttttaaaattacatttgtgtgcatgtgagtttatgcgtatgagtgtgtgtgtgtgtgtgtgtgtgtgtgtgtgtgtgtgtgtgtgtgtatgtgtactaatgtgtgtgtgtagacactatgatttgtgggagtcaagcctctcctaccagctgggtcccacagaccaaactcatcagacttgtcagcaaagtgcctttgtctgctgagcaactcactggctcagattctaaattcttgaaagttgaatagaataagttcacttttgaattctctagtactggtttatacagttattcaaaatgcaaacatctacaggccaaggaagaatcaatctagagaatttaagatactaggtatgaaaatctgaattactcacactgccttgtaataatttcttcaaaaactgagctaggtcaatgttttatcttatcaccaagccttagttcatctcaacaggaaaaaaaagcatttataacaggcccaccttgagaagtcagtaagtaaagaactacaattaaggtgggttttgtccaggtgtttaaccagtagagacacagacacaaagaatagtaactggctaaaagaacaaagtaaagagatagccttgctacttagtatataatctggttttactccagtatgttatctttctttcttctactttgtagtgatcacttatttaaaggaataagatgttgcactaagacctcctttttttcaatttttcaatttttaggagaaaagactaaaagaagtcttattaaagtaagattatgtgaaaacatatgacagactgtacacacataactaagggctataggatacatcactgtgagaaatacaaacaggcacaaccgctgcagaaatgagtatgttggttcttgagaaaactgcgaagagaactggactgagacctcttttaagacctcgctttctgtattactttaagcagccattggatgtcagtgctgtgccaaaggagcgcattgtaaatacagactgacaaatcgttcccacaggcactgtcggtttttacaactgaaaatgacactagtcctttgaaagagccaaagcttcaatagagactataaagcatttgccttatctgggtggcaagtgagccaaacgctggaaagaaaaatgaatttcactgcacatttacagtttaatgtaaaattcagaatcacatctccacaccttgtaccgccatcctcttgggcagactttaactggggatgtttccatcgataggggtaaagagtccccttccttgtaaattgttccctgattacaatgtgtaaaaaggaaactaaggaatgcaaacaatgtataaaagggaaagacctgcctacaatgtataccagggaaaggaacacagaggctgcagaatgaccagctgcggcttgaacaaatggaaatccccacccccacccccctttacccatcaggaacttcagttgcacacgctagccaaaagctgctattctgactgtgcttcctgtgctgcagaaacctctacaaaccgcaaaggcatgcagcgtcggggcggagaacctcagaggctgctagaggagtcacgctaaccctccctccagctcaaggaccacagccaacgccagccccgggatgcccaatcctactaaaaaataactggacaattcctccctgcgtgctttattaaaatggaagtggcagaagcagaacgagtccccgacctccagggcctcgcgggtgagaccatcaacccaagatggagggatgacagcaggtcgcggaggaggcgtcaagtgaccagaccgaagcaggggctatgacgagcgcacttggaagaactcacacttaacagcgtgaagcagttcactctctcacgcaaccctaaccgggaatcggctcaaaatacgtgcccggtgtacgcaggcgtcgcggcctaacccggaagcagtgcctctctggggggtcacctcggactgtggatagaaaactacctttcccgtggtgaacctctcaaaatctcccagacttctctcggcctccagcgtcccatcttttccctgggagcggactaaatgggacttcgtttcccagggtgcagctggctgggttcagctgtgcgcgtgcgcaccaggactgtcccgcgctgtgcccttaaccccgcctctggcctatcgccgccattttttcagggactttcatccggcaacggacggggcctttttttcttaaaggagaagcggcaactcaaataatttcccccttctcccctcaagagctggcggcgctagggacagaaaggccggagcaggaaggcgggggtccgggtggaagcggggtaacgtccaggctacttgttaggctagtcagagcccttgagggaacagtggcgcctcagggaggcaggtgcgcgcgcagccggcgggggggaggattgagatgcgcgcgaagctggtcaaggtgcgttttgtcctctccaccgccctcgccagcccggcccctcccaccgcccctagcttgagctgaactcctccggggggttaaaaaaaaaaaaaaaaaggtcactttgggattgtcgcgagacgcggccgtttaacggtgagaacgggtgcgcggggaaggaaacctcgcgctctcccttggagccgtttcctgattggctgaaagaaggggtgggggagggcaccgagtgcgctcctgcgtgtgagaccttgaggggcgggtccgggaggccgaccctccttcccgattgggccactgcgcgtctgtgcgggtgcgcgcgtgcgcaccgccggcagtcgcaggcttgagtggcagggggcggggggggcgccctaggagcgggcggaggggcggggggggaagagaggtgctcgggagtgagggagccggactctccgggagcctagggggggcgggggggagctgcgccgcgggcgccgccgcctccgccacctgggaagcaggggtgggggacggacgagccccgatgccgggggagacggaggagccgcgatccccggagcagcaggaccaggaaaggggccaggcagcggcggccgacgcggcttcggacgagctccggcccgcgcggcagcagcagcggcggcggcggcggcggcgcctgcagggaccgcgagcagccggcgtgctgcggggaggtcgggaccgcggccgggccgctgcggccgccgccgccgccgccgcgccgccgctgtgtcccgccggaggaaggccgagtatccccgccggcggaggagcagccccagcaacaggcctcccgacgctcccgggcagcagctcacggccgcgaagccccagtctcctgctcagggcaagaagagtccgcgactccagtgagtaacagtctttgaggctttggggaagacccccctctgatcctcactaccctcccggctcccgtagcacccgctccacgtgacaccccgcttgctctgccccctgccggctcggcacgccagatgtcacgccgctggcggccccgggctcctgcggctggctcggcagcctgcggccaccagcccacgcccgaagtcaccctgtgcaggctgctttgccctccgcctcccgcctgctcagccctcgctctggctggcttgtgcgccccctttgtcagcctgtcgcttccagtctcagatcaggtccccgcgaggaagcccacagcaccgtactataacccctgaagagtgtctttgcccgaccctatttatcaactagcccgcgagccactcaagaggtagccttttcctcgtcctcctaaatcgtcacgttcatttttttaccgtcaggatgaaaacgtgactatgccacttatactttacgtgaccaaactagacgtgtagttcttattacctaccaaacattgtatgtactttttctttatgcgtgtattttgacgtagtactcagattgagaggaattactaccttgaactaatagaggcccttaacagattgccaggaacataaatattttaaattgcccaatagagtaatgcttaaattaaaaataaagttacacgttttaatcaaattagctgttcattgttgagaactgtatgtcatttgatttacaaatgggaaagggggacagaaaatcgaagggctaggatttcgagtttcagataactgcaacctcccagtagcagtgcagcggcttttcttaccttagacctagggcatttttaaaacttaaaagccattttgtttcaaaattaaatttgtgattacaaatttttatgctgaattgagagttgtaactgttgtgtgtacgtgcttaggaaaatcttaaactgttatgtatttaactcactaacttgaaaagctgtaaatcattcatcttaattgggacataaattccataggcaaagtctttaacctatgtgtacctcggattcttcatctgtgcacagttatatggggagttaacctctatgacttgagtttatgtataataaatacgttgtggtaccattttacacagcgtctcacacagcaaaatgctaaattcaaatggctgttttgagtattgatggcctaacagagacaggagtactttgtagtggtggttttgtgtcagttttgtaaagctgcatggctttgtgttatcttacatgaacaagtattttaaatcccacaatgtaattttggaaacagttgatcttggatgaatatgactgcttgcctgcttggttttttttttatcacaatattcattatggaagggaagaagcaatcttaatatttcttctcatatagtactatagttactatatgagtactatagtatatatagtactataaagtatagtactataccttcttttgccttcagacttgcccttgcacgtgtatttaatactatacaactttgttattcttaaaatgaatttccatttttattgcacatttcacttgctctgtgtcctacaaatcagaagaatctcaacacatttccacctttgcattccttgtttgaaaagtaactgggactagtattgttactcctctaggcaatagaaaattaaatttgtcctggccttgtcttcaaggaccttgctgaggaagcgaatgttgattaacactcaagaaacttatgtacatggtttacagatgttctgtgacaaaacattttgaaactcatttttctgtttaatcctttgagacatgcagttttgagtgtcagtgtactgaattctgaccttgattagtctcttccaaataaaaatttaaaaaggagatgagaaatttaatatctatactaattatttgatctttttaaatctttccctccctagttactttttcattcattttccatatctctgcattttttaaacctacgaatcccatgtaattagctattaacctgtatttgtttccctcaatgaaagaaatagcaaaatatacaaaattgtttaaaatatcaaaaacatagatttggatcaactatttaggtatttgtgtataatgaatctagcatttaactttatgccttcctcctgaacatattcactgaatattcactgtgttgttaatggaaggcaaattatatagtggaaaaaagcgtgaacttgatgttcaagctgaaaagttgatgtcttgccttgtactgctcacttgattgagtaagcgagtcaccagcatcctctatcatggatgttttgagtttgtgacaggagctttacagctgaatgataggttatactttcataaacttaactgtgtaacaacttattcacattcaagtttttgagaattaaaagaatacaaaatattaatgccggaaatgaatttcagtgaatatgttcaggaggaaggcatagttaaatactagattcattgtacacaaatacctaaatagctagtagttagtgatttaaagtcaatttatacaaagcttgtgttcatgttatttaagaattaagctcattgttttctgtattttagttatggaagtacttaaagaagcatgtggtggtataatttgaaggttaaggatatactttttttccctttgacttattgtttcttatatgttttttcttcttttttagagtgtttggttgggttttggtttttctgtttctttatgtctttttttaaagacaaggtcttactatgtagcccttgcctggaactttgtatattcaccatactgtgcctccaagtgacagatgtatcagttgcctctgcctcccaagtgctttgattaaaggcatgtaccaccccgcctgacttttctgtttttaataaattaaaatacccatgtgcaaaacggtgaaatcaagttaagagtaggctaggaggcaaaatatctttatatataaaattggatatctgttcattccagattttaaaactctttagcaaataagtcttgaaacttaaaatgtggctgttacatagccttctcaaactaatccttgaagagtttttttttggaaggcttttggttcagatgaatgacaagtgaaggagggttgttttactctctggtagatggagttcagacttctttgtgaaggggttttttgagttttgttttttgtttttttatcaaaactaaaatagcaataaaccttttgggtttttttttttttctgtgtttgcttgaagggttgtggatagtaagaaggatggatgaggtgaatattctgaatagacaaacacaagctttttgtttctagaagacctcagttgcacatcactggactcctaagtggtcaggatcctagggggcaggcagtcaggatgtggtagaaactttgaactatttcaaaaacatatctaacaggtgtgtttttagtgctccatttactaaagtaaaggtggttcacaattacttgccagttgtcaagtttgtaacagaactaaagtcgagtcattatagttactgagcgtttaaaaatgagtcataaaagatgacagctgttctttcacaaaacatcctttaattgcattgagtttatttgcaatctttatgctgctagatatatgtgtatctttatgacagaaataggaagccagtttacttctgggtttagggaaggggtatggaattcacaatactgtatctccagttactttcgatagaagttattccaaattaaaatcatgggaatggatttgtattttaagtcaggcttataacgtttgagctttttacttgcatttaatttgtaaagtataagtaatatttatttggaatgtgtatatattgcctttttagaaatttttattggatttagtaaccaattttaggagctattaaaattcaataaattttgttagtaaaattgttcagtaaatacatagcagagatagttgtgtagcaaaacctcaatatttatcagtgagatgagagttaactgacatcttaccacccttgctacatctgcctccctgtcccctttttagacagaagtgttttagagcacacctcatgttgactctttttttttccttttggtttttcgagacctgccagctttctctatgtagcttttgagcctgtcctggcatttgctctggagaccatgctggtctcgaactcacagagttccacttgcctctgcctcccgagtgctgggattaaaggtgtacaccaccaacgcctggctcatatgttgtcattttagtcttatttactgtacataaataaaataaggacatttgttttcttgcataaccacttttaatagaattagcaacattttccttgtgtttttttaatgattaagaacaattttagatgatattctgtagccactctttaagtttacattaatcaatataaaaaatttgacttcctcagatacagtgccatagtatagtacagatagggtatttctactgcagctgaaaattaggctttgctttgaacagcatattgtagatgctttctgtattattctagaagtgaataaaataaatacttgtgttttaaggaaattcacagaatttaacatttgactcttaatttctttcaggtgcatagaaaaaatagcaagtgataaaggtaagattcttcctttccacgtatgaaaagctctgtcttgtagtctaattaaaagggcactacagttcagcctgattattcagtgctttccattcgaaggtgatttgtgtagtaggccctactggaagatttagaatctgtttagatggcataagaagcagatttggaaaatacaatgtctttgaatttagaaactcagtaatgggttataacttaaaagccactctacttttttaaacttagccacagggaaaccaaaaaagaaaagaaaaaagaaacctccttaccatttttcagattagcttgctaatttacatccattgatagtgtggtatcctttttttctagatcatcactaacactgaaccatttgttttgatactagttataagtttgaattgataatttcattgtgagtttgtcattataactgttgtaggggttttattgtttaatgtttatagatgtgcatatggctcatatttgtaaatcccagcattcagatggcttaaagcattgccacaaattctagactagcctgagctacaaagtaaaaccttgtctccagcaaacaagaacatcaaaaagtatgtatgttatgtaatttaataccccatagctgttagcaaaaaggaaattctttacagatagaagtagagaacattacttgaaattggccaggcataaaaagacaaatgctgctgtattactttaatgttacacgagtgtggcacgaataaaaaaacccagagaaagagagattgggattaaagccgaagatcagaaaatcaaagtggccagccactagctcaggcattagttctaacctctacttcagattgaaaggtgtgagtgatactgtctcagattaaatctgactgcatctgtctccaccaaatcttagactgcttagactgctcgtgtcccctccagtcttatattcctctctagtgctgggattaaaggcgtgggatcccaaattgctggtatcaaaggtgggagctctgtttctcatttagactctgtcactctcctttagccagggggtggccttgaactcacagataaccatctgcctctgtctcccgagtgctggaattacaggcatgtgccaccactgcctgacctctcatgagttgtatataagtggtagaatagttgctagaagctaagaatttgggggaaacaatctgttgatgattgggtacaagttttgcttagactgcaggcgtacatttcagtgctttattgtactgcactttagtatagtaagtaatgatgtaatagacattttaggattgttaaagtcatttttaatactcacacaaaaatggtaaattagtaaactggcagttacattagttagcttaattggagctttataatataaaacacattttgttcatgctttgtgtataactttcaagtttctccagcttagctggcaatcaccaaaggctgggacaaaagagcagcaaccaaggatccacctgcatgtgttccttgcagagtggatttgcttcctcttatgtcttacctgtagaaaaccacactttgaaggagtttttagaccctggagggtgggtagtgctttaggtaaacaaggttagcatagtaagggagagtgagcaacaaacaggaactgttgaggattaggagcaggagtgacctggaagttcataggattgcaggctttccgagacatctctggggattttatctgtggctacactcttaacgaattttgcatgtggaattaaaaactggaaattgtctgggcagtggtgctgcacttctttaatcccagcacttgggaggtgcaggcaggtagatctgagtttaaggccagcctggtctatacagtgagttccagaacaaccagggtcacacagggaaaccctgtctctaaaaataaacaaatagacaaaacaaaaaacaaaaacaaaaaacctcaagattcatggttgaatgttactataatgctaagtatgcatttgaagtaggtgctgagacaaggttaaattagaagcatttgctacaccactaaatataattacttgtcagttaaaaatttgagaaacccaggatcaaaccagcaaggtagaaattaagttagttgttggttttagactttttaatctaaattgtaggctggaaatttgatgtttctgatagccttgcgattgaatcccttctcaaaacttaaagtgtttcaactgattgagattgatgttcaagctgacagctatgcactacaacacaagcatattaatactaagaattaactaaccatgaaacttctgttcttgactggatatgttggtgatcactgggatgacttaaaatacctatggctttctaagctctcggttgcttccatctttttgttcttgccatgtgatccccctgtacatgatggcaggactggcatctttatatagacttgcctgtctccagaattgtgtgaacaaaggtttttgtttgtttgttttgggtgagtgttgtttttgtcttttcttaactttccacaaatttctggttctgacaatgtaggaccaacaaatcttaaattctcaaaataaaggataaacaacacaggtttatgtagagatttgttctttttgtatgccaagcagctggtctttttctgtataagacactagctggggttcttctagttcagtggttctcagccttcctaatgctgtgaccctttaatcggttccacatatggtaacccccaaaaataaaattattttcattgctacttcataactataattactactgttaggaatcataatgtaaatatgtaatattcatgatatcttataggtggacccctttgaaagggttagtcaactcccatccatcccccaaaggggtcacaactcacagattgagaaccactgctgtagttgaattcattttgacacccagttccagtactgcctatatgggggtagcatcccatctcacagattgctcccacagaattgttcaccacctccaatgccaatctcatgttcttggtttttctgctagtcattcctaccaacactaaaatatttctatattctcttcattgggctagctagagtgactcatagaacttggagaaacaactaggatataaaggaaattataaaggttatagatgtataggacaaccctgtcttggtgaccaccctccaggaacctgtgtttgctcatccagttcttggagtggggttgagaggggtgatgttcctgaaagcttcactaagtggtatgattgatttaatcactggctgttagtgggtagctaacttaagccccagctccctcactgtaggtgagggagaaaagtgacagatgttcatcatgccataatcttagtgttcactgtcctaaagctacccataaactactaggccctagtctattcattagcatacaaagacaattactatctattcttaaagatttttttcagtggtattcaaaagacagggctctcacattactgttctagtataatgtgaaaatgcaaagtagaagtgtgtggatgacttggtctttattttctctcattaataatgtgggccaagaaccttttgaaagtaggagtttgatgcaagcctagtagtagcatttagtaatttctagcaggcatgagaatcttggtttgaagccaacttgcactacatggttttagaccctgtcttaatataaaaaataaataatgtagatatggcttttccattgaacagttcattgtttttaaagagaaatttttttatatcttgctaactgggattgggtgatgagctttgttttatttcttgtaaataataaaacacatggtagcatgggatctctatgaacagcactttttttgatatagaatcttttctgtttttgcccaggcagacctaaaaataaaactaaatcctcccttttttaggctccctgatgctggggttataggcatgtacttaaccagaccaatgtcaaactacttagaaaacttttgtattcttcccctacaccttcactttgagaaatgtcattgtaactccaatattgaacctttctggaatgatttaaatgcgtaatatgtttcttatttgcctcactgcttcatttgaccttcagagtcttttatcactgtctacagttagtattataaaatgttgaaatgtggctgtactggttttttgtgtgttcttttgactttgtgattaagtcatttttattccttcacagtcattttagtggtttcaaagcaagttgaaagtgtgtgtgtgtgtgtgtgtgtgtgtgtgtgtgtgtgtgtgtgtgtgtgtgtattctgttgaacaggaagcctcctgagcactctaaaactttgcttaattctgataactttttaattccatctaacctcttgaaacttgaagactatatcagtgagttggatataattttagagcttgtttcccctgacctttcatttaaaagtgaaggcactgaaacataaggaaatgtaaattgttttactgaattgcataagaaaccacaataaatatagtgtcttaaaatgatttatttttctgaaatggctgtctgatatgtatatcagctgttgcctagttacagttctcttgcatgtggctactttgttttaaatgacttaaacaagcatcattacatgacaacctttaggtagctttgtaacagggaaagtaccactataaaagtgatatttcagtcatgttacatttacagtataatatatcactagaaattaccatcataggaaacctttgcagaatttttacatctccagtgttaatgccctttcagaagctgttctttatggcctatttcattgcatgtctcctgattctgttatttaaaaaaataataataattcccttattgagaatttcataaagtacacaatgaaataagagcatatgtgtttcccatttttcctttctaccccacccccacccccagtgtccctaaacctaggtcactgcgtcatctttttttgaaatagggtcttcctatgtcacctaagctgacctcaaatttgtaggatcattctgccttaacctccttagtgttaggattataagagtaccatcaagccctgcttctgtgtaaacactgcagatctgaagccgggtgtggtggcacacttataatccagcatttgagaggcagaagcaggaaaatcagtttagattggccttagccatatagagagttcaagccagctggactacatgataccctgtctcaaagaaaaaaaaagtaagggggacgggggcggagatctggtcatgccacttacctacttgaattcatttcataattattagggtaaaatcaaaaatctcgccaggagcttcttgatgtgatggcagtttgtcatttcttctgaagtgattttgaactggctttttaactttctttgggatatttatataccgtcttgatttctgctattctgccatccagctgttacttattacttctttatcctttggagtccaggggtatctattaagcattgagctaattgtcagataaagagtccattaagttaataaacacaaatataagagctgcttttaaagagaaagcaaaaccagtcttttggtgctttttaaggaacaaaactaataatgttggtattgtgaaagtcaaaggctgtatgttgattaggcttttgtagttgtcctaaactttaatattacctaaaacatgtgtaagtttattaaatttatactcttctgtttacatttctgtactgaatagtagtaaatagagataactagaagataagattctaatttaagtgttaacatacatacatgaatagagtctagtttacttaaaataagagacctatctatttggggatgcagctgagttggtagcttgtcttgcatactggacacctttgcagagttctgttcccaggtccctgtattatggtgttgctcccccaaatctcagcactcaagaagtgggaacacgaggatcagacatggacctcctcaactacaaataatttcacgctggcctgggttacataaaacctagcctaaggagggggcaggggtaggaaaagaataagtgaacctggacaagactatgggttatttaatttcttatgtgaccttttctcctggttttgttcacagaaaaaagttcttcccattctgttttgaaacataaatatcatgtataccttcagattaagtcagctttggcagggtaatttttcttatgggtctttttaactcattgcattatttagattggatcttggcccttgtttagttgtaaattatcaaatccaaaggaagtttacattgacctctcatgttcattcctcttttctcaggttagatacctatagtaggaaggatgtatttggactttagtgtactcttcccttgtgagctccaaaacttaatgtgtgagcataaggaagtcctctccttggactgtaaagacaggaaaaatgattacttggcagggtatatgaactatatttagagaaacaggaaaaataattgctatcactaggtaggtttttgaggattgatagttctctataaaacacagttaagatctaaaaagacttttacaccagcttctaaccctaattaaacacatcctgtttcacctaagaaccagatattagctatatttaacttttctaaccctgagataaatgggtaacctgaaagtcagagaaccaaatattgtgatgcctcatctaatatatttcttcatggtcaaatgactgcaattcctggaattttatttagcttcatcttgcttcttaggagaattagaaaaaatattcctgttgctagtgtcaatatcttggattgcttcataaaactaactacacttgtcccattgtcttctttcaccttagctattctggcttcctcccccccatcatctttgaataagatgaaacatggctcttttcctgtctccttgtgattgtttttggtaatgtgtgtatcctgttgtcaaatctgttctctttgtgaatggagtgggaattgcttaacaaaacaattaaagcatgcagttctgtgccaatgtatgtgatattttgaatgaaaatggccccagcagactcaaagggagtggtgctatttgaaaggattaggacctgtagccttgttggaataggtctgacttagttggaggaagtatgtgactgagggtaggtgggccttcctgctgccctgctgatcctgatgagtagaactctcagccacatttctagcaccatgtctgcctacatgcctccatggttctcactataacactaatggactaaataaatctcagaatgtaagcaagccccaatcaaatgctttcttttaaaagagttgcctttgttgtggccatctcttcacagcaatagaacaacactgactaagaccatatattagtattgtaagaccatactatagtattgtacaaccaaggactgctacctaaaatccagatgtatccattaccaccaaagaggatcactataccatttaagagtaattattcctcctcttccctaccctgactccatcccttaccctaaatagtaattcctactttctatctctaaattttccttttctggatatttcatataaacgtagtcatataatgtgtgacttttcttttctgtctggtgtctatggcatagtatacttttttaagaatcatgttttcagtgtttggtcctccacttctcacactcttgaaggctgaggggatgaggcctgactagtataattaggttactgggagcaggcctcaaaaagttaagcttatccctggctgcaatttctgtgtcttcaatccatgctaagatgtggaatctgcctcatgtatctattgccacatcttcccgccttaatgagctgaaattgagcaaagataaatttttctcccttgtgttggccatgtatttgatcagtagacacaaaaataactcataatttggatgcacaaccttttgttgatagatacttggttatttacacattttggccatcatgaattgtgatactataccatttctataaaagcatttgtttgattaaatccctgttttcacactttgacatgtgacttgtctgctaagataaaattcctgagaaaacaatttacaaaaaggaaatatttattttggctccttgtttcaaaggtttgcatccattgccatttggtctatgtttctgggcctacagtgaggcacaattaattagtttttctgttattaaaaagattctttcctcatacaataaatcctgattacggttccccttcctttactgccagttcttccctacctcctcacctcccctcctatctgaaaagtttctgcactccgataagcctgtctgccaatgcagcagtccaaatcggaccaaattaaaccgaattagaaaaagcccatgtttaatagatacaacattcccggatgattttccatcccccaagagatgagatggaaaagagagaccaaaaactcagtttgttttctgggggacagtttaaataccctgtgggggtcttaagcatctgggtgagggttatcatttggtgggctttctgagatgcagcaggatttgaagagagagaggggaggggccttgggacgtctcatattcattgggtatatggatgccaaggggtggggtgaagcttccaccaggacatcccagactctttggtgggtatgtaggtaccaggggctgggtgaagcttccaccagaacactatccatatccattccctttctgtctctcattagaaaagaacagacttctaagagataacaataaaataaaatgaaaaccattagatagaaattgcacaaggcaaaccaaaagaaggaaaagagcctcttgaaagaagtcacaagaatcagagacccactcattcacacagtcaggagttccataaaaattctaatctgaaagctataataatatatatatgaaggtgacctggttgcctatccatgtcaggcctgtgcttactgcttcagtccctgtgaattcatacaacctttgttcagttgatttaggagggccttgttctcctggtatactccctccatcccctttctagttcctaattctttctgtctcttcttccttgggattccctgagctctgaggggacatttgatggagacatcccatttagagctgtgtatcccaagatctgtctctctgtgtattgtctggctgtgtgtgtctctgtttttgttcctatatgctgtaggaggagacttctctgaggatggctgaatccttaaggcactgacctatgagtataacaaaatatcattaggaattattttgttacttttttttttttaagaccaatagtgattggttttaccctaggtcattggactgtctagtctcaggttcttggtcacccaaacattggcagtattggatgtgggttctgtctcacacattgggctttaagtcaaaaagacattgattgattattctcacaagacttgtgccaccactatcctagcataattttgcaggcaggcaagataccattgctgtatacatttctcttttggtattggtagcctgcagagtaccttcccattccaaacacactagaacataggggaggagtgaaggttctatgtaggtaccagttcatgatctccatgctcaatgaggtaatgtgggagttgtcttcagtatcagggccttgctgtcagtataaggagagcaatctgttgtcaacagactgggttgtttggggatttccaagggacccccttcacccacagtgcagttcccagtagtggaagcttaatttggtgacaagaaatggttagttgggattccatctccttcattatttagaaacttcattaggattgccatcatgtattttcggaagtttctactgcactaaatttccataccactcacatctagctgtctctccctgcgttcctttcctcagcccgtctctcttccccctccccacctgatcctcccattcccattacccgctcttaccccaattccactctggatctatggattgtagcttggttatcatttattaacagctgatatccacatataaatgaacacatttttttctagttccatcccctacaaatttcatgatgtactttttaacagttgagtaatattccattatggaaatgtacattttctttatctgttcttctcttgagaaacatctaggttatttccactttctgactgttatgaatagagcagaaatgaacatagttgaataagtgtccttatggtaggatgcaatgtcccttgggtatatgcatatatgccaaagggttatggctggatcttgaggaggtagattgatcacagttttctaagaaattaacatgctgctttccatagtgattgtacaaatttacactcccaccagcgatgtatgagtgttcctcttatttcatatccttgcaaatatgaggtgtaactagtgttactgatcttagttagccattctgatgttgtaaaatgtaatctcaaggtagttttgatttacatttccctgatggttaaggatgttgaacatttgtttcttaaccatttaagtttccccttgagaattctgtgtttagatctgtaaccagttttttggatcaagtttattgagttctttgtatatttggatattagtcctctgtgggatgtgcagttgataaaaatcttttcctattccgtagactactgttttgttactacaatgaaggaatgttgctttatagcagccaggggcaaggcccacttcctaacagtccactaagccatgaattcattaatccactgaagttagacctctttgagtctattacttctgaaggctcagcactgaagctattgaaattgaaagacttagttttgagtatctgagccttgggggagacccattacattcaaatcataaagtgaactaggagccgttgaatcacatgtaatttgttgttgatgtgttgtgaatcttctgttttcctacccagttttaggactgtttgcattgtacaagggttccagtttctctgaattctctccaacactctttataagcatcctgtcctagtcagtatgaaattatggtatcaggctattgatttgcttttcataaatgactgatgctgagtatctttgcatgtgtttttggttattgctttgggttttaagtgttagctcttaaattttgtgtatatgattgttttgaattaattttaatttttaagagctaggaatctagcttccttctttgtatgtaaatactgttttcccattaacatttgttcacgaaaatgcccattcccacatccagcagttttacaaccttattgaaaagcaggtgtgtgtgtgtgtgtgtgtgtgtgtgtgtgtgtgtgtgtgtgtgtgtgtgtgtgtgtgtggtttatatgtgtgtgtgtgtgtgtgtgttggtttatatctaaagtctcaattcagtttaatggcttattatgtttagtattttgccagtcagtaccacacagtggttcctttaacttttaattggctttggagttctgaaaaagtcttcctagtttgttcttgtcctacatagctttggctactttcagactctaggattttcatatgaattttagaatcaggttaacagaatctagatttttatagatacattaaatttgtacatctgttttgggaagatgatcctcttagcaatactttttaattcttgtttttaaaagggaaccactttctgaatttccgttggggattgttcatttagtaaagtatgtaagacagaattatgtttattgatctttattatatacctttctgaatttattacaagggagataccaatcaatcgatctgtatgaatataaggtcatttaatcttcaggtaataaaagagtgctacacccacccgaacccccacccccagcctcagccccagctaaggtgccacctttgcttttctttcttttcccttccctaattgttgaggcttgaatttctagtagaatgttaaatagaagtaaagaagaggtcatccatgactttctgcttaggtggaagacttgtttttgccactgagtgcagtgttgattgtggccttaagagactatgttctcttttgtcggtttatctatatctcctgaaatgttttttttttattctactgatgcatattttgtttcattttgaatataaaaatatatattgattctcttataaatatgcatttgctttataaggaatcttaattggtatgtagggatttgtttggtgtcatccccccccccccagtttggtgttaaagtaatgttggcatcataatatgattgggaagtgttctatttaatatctttgaaagtttgagaacatctggaggtttttatggttttttttttaatatttgctagaattgactactaagttctgagcctaggtttttgtatttgggattcttgaggcttagagccacaaatgggaagacatttcagtaggagacttaatgctaccaaaatgcagactcttgcaaccattgggccaagaatacaaagcactatctacaaagattactcttacgccttacagtctaatagaattggatttactaataccctgacatctgtgtgttcaagtgcctgttttccagaagccttgccatgatcatacagtctgttgtcgtatatttgtgtaattatcagaatgataggtaaagcatgcactgctatgctgacattataaatgaattgagttttttgttgtttgtatgtttgaattgaaagccatattttttctgaggtgtcgttttcttttgggctgttattaaatagactttgctactgtttcacttttgctatattttatggttatgcagtctgatgttaccttaagttttacattatttttagaaaggctttcacatgtgaaattattaaaagaatgtcctcctgtcttaagtacgttcacttctaaatagaaactacatttatttactagctatatgcactctgaatacttatgttattgctaaagtcttcagtgatgtgtcttcaatgaggggataacccacctcacttcattcaacctaaaaatgtgagaaaatagaggaaaatataaaaagttttttacacctgtatacagtgtcccacagagcctgaaataaaataatactggaactagacttaaccatgattgtatagatgaatttaaatacatggtgtgatctaagtaaaattgagcaactacaggaagggcattcctgtaggacaatcctgttaaattctttgcaacattacagttattgaagtatctagaactgtcattccttttgcctcccctaattctggttttctttctgagaccactttcttaatttaacttagagctaatggttagaattccatgagtcaatttcttgggtctattttacatgcattttgagtaaataaagtactatttggcaatgaaatgtattttacatagagtagcaatattaggataagtgttcctttagtatgggggctgtgtgtgtatacatacatgtgtaccatacttttagttagggttgcttgcatgagcattggtacaagggcaacttatagagttgctatgtcacagggcagtatggctgtcccctcccagcaagcaataactgcctccttatggacaggtgagacctaatgttgaagaccccagtcttgggcagataactgcagtcactgtggatttttatgagtgtagcaaccatatcagattcaggacatagcattttacagcacaatttcccatatctgattcttatattccttccacccttccctgagccttgaactggatgatatagatgtcctggacagtgctcaatagtcatatattctcagcactttgatcagttaagggtctctatattaacctactgctcactgcaaaaagaagcttgtctaatcaaggctgtagaagctctgatcactagatgtaacataaataaaagcagtatgacatgtctggttaggaaaacaacagtaataggttgagcgtgtaagtggatacatcttgcctggcagtactgtagatcagtattgtagaatgcagggtttacaactggatgagactttcccagcagtgtgcatagtacctttcagcactgtaaaattgagtcagcaggaggaaaagcatcgaattcatttccagcttgatgtttgtcctgcagccagtgtgtggtgtcttcagcagtaggttcagaccattcagttctggtgggcaattgcctttgtttttgttttttatgatctcaccggccttaattcatgatccttcttctatacagatttttacccaaaaacttattattatttttatcattattatttttattattattatagaaatattaaagaacaacaactatttcctagctacactaatagcaatcacagccctaatcaatctattcttctacagatgtttaatttactctacttcactaacaacatttccaacaaatgataactctataaatattcatcaaaaaaactctacctgccacacttgtcttacttagagttactattgctgtgatgaaacaccatgaccacggcaactctcctaaaggaaagcatttacttgggacttgcttacaggttcagaggagtccattgttgttatggcaacaggggtgatagcatgccggcatacatggtactggaagtgactgagagctctacatccagatctacaggcagagagatactgcgtctagctttaagcatttgaaaccccaaagtccacccaccagtgacatacaaaccccaacaaggacatactaatagtaccacagcatgcaaacataacattcaaataaacaagcctatgaggccattcctattcaaaccaccacaaggcccaaaaaaaagtccattttatttcagtgtcctcttgcttgtttttattatttcaatgaacatctttggggggtgctatttattggttaactgaaaacttaaattgtgttttcaacagatcccaaggaagagaaagaagatgattctgtcctccctcaggaagtttccatttctgcaactagacctagccgcggctggcgcagtagtagcaggacatctatctctcgccttcgagacactgagaatactcggagctctaggtccaagactggttcgttgcaactcgtctgcaagtcagaaccaattacagatcagcttgattatggtacgatgcaaattcagtatggttactccattacctaattggttctttaatcttaaatgtaatgttgagcatttacctaaatgtttctaattttcaagcaggtagtaatgtagataggatttgtttcagatatgctgtagatagtctctatttaaagaactacttcatacagttacagtgatcacttaatctttagctatgaagagaaaatatttcatgtttctcaataaattttggtttaattttctagacgttccagaagaacatcagtctcccggtggcattaggtataaaatttatttcaaaaatctttgattactcattaaatgactgcgactttatttggaattttgagctgttaaattaacttgatttttaatattacacttaatattccacatttgattttaaaaggaccataaaactaaaacttagtttcctagttccaaaagcatgtcttaagtatcttctctgggtgaacttattctgcgttggacccagaaatataagtgtcttgccagtgtctttcatcatactttggtaatttagtgttggttaagtctttcatgaaataacacattatcagacatagaattacaaagtcagttgtctaactcttcttgccattgggtaattatttctcatttttacttaaaatgttgtatcttatttgtgtagtctgagttctaagtatagcttataataaaggagcttaggatgtagtacaatcagatcataaggatggaaattttgggtaatatgaatttgtgattgtgtctaagtattctagttcagtcctattaaacagtccttggaaccagaatttatcatgtttgcttacttgtagtagtgatgaggaagaggaggaggaagaagagatgttaatcagtgaagaagaaataccattcaaagatgacccaagagatgagacctacaagccccatcttgaaaggcatgtttgaaattttactgtacatgctagtagaaaatatataggaatacatacactgaatatatttttgttgcaagattatataagcgcaattttaaacaagtgattgttttgcaactataatattttattctctcatatagctctctttggtctaatgacctttaatattgactgtactatttagtagatgtgtgcatgttttaataaggttttctggaatgtttagaatttgttcgctcaatatcttatttctctttacaactatagtgagatttgatttttgtatgttttggtctgttgctatgatgaccaatgatgactaaaagcaaattggggaggaaaaaggtctatattggcttattttccacacgacctattgaccatcaccgaaggaagtcagggcagaaactcaaacagggagaacctgggacaggtgctgatacagaggccatggtggggcgttgcttcctgccttattcatcatggctacctcagcctgcttcttacagactccaccaaggttggtcacatcctcagtgagctgggttctcccccatggatcactgtttaagaaaaccgccctccaggctggcctacagcccagtcttatagaagcattttcttagttgtgattctcctttcagatgactctggcttgtgtcaagttggcataaaattagccagtgtaaagcagtattcacccatgggcataatatttatacatccttgctgtggggtggggatgtgggcagttgataagaagttgtggtttgtacgctgagaatcacagcttcagaataatgagataacgataaaccctaaccctgaacctggtgtcataacactatgttttatgaagtcttagaatgtttgtgttgaaaatgtttctctgttttcagggaaaccccaaagccacggagaaaatcagggaaggtgaaagaagagaaagaaaagaaagagattaaagtggaagtagaagtagaggtgaaagaagaagagaatgaaattagggaagatgaggagcctcctaggaagtgagtaggcggatactgttaaagtggaaaccttccttttaaaaccactggtagacagacttcaagttatatgggagtgcattcaccggcacggacagacagacagacagacacgcgcgcgcgcgcgcacacacacacacacacacacacacacacacacacacacacacacacacacacacacacacacacacattcattcaggcctggggccagatgcatttaatctagcatttgggaggcagagacaagcctctgtgtaaagccaacctaatcttcatagctaattccagccaagccagggtttcataatgagtcctctcaaataaaaaacccaaacacaagaaaaagatatatgagtgtgtaaaatgctgatgttaagcaacttagagtttctttggagaaacttctcagaaacttgaaaagttgttttggtgttggttttgtattactgcaaagcaatatattagtaagtccaaatgagcagaagaccgtatctatagggatacagagggaataggaaagccagaaaaaaatttgtcctcaaaaactaacaaatagttaaatgatgcagaagccttgattctgtaaaatctgtctgtgtggcacaaactttgttgcagaaataaggatgttttattagcttcttgattgttatttttaattagttgcatttagatgataaactcttactacaactagtcttcaagtaataacattaaaatttaggcagatattacatagtaatgcctagtttgctactcaaagataaagaataaattgagtggaattacctcagagtaaatctagcttagtggccagatgcctttgtttttgttttatgtgtctgtctgtgttactggttgtgccctgtgtctgccatctgttctttggcctctagaatgtgcttcagccatccttatctatataaccttctatctagaatatttagataactactctttcttaaattataggagagggagaaggagaaaagatgacaaaagtccacgattgcccaaaaggaggtgagacatttctactcctgttttttataacttaggtctttgataaatgtttgattactttagctttcataagcaaaggagatgtggcttattgaaaatttcagaaatgtgatttccttagtgtttatgatgcacagatggtgtgtttttatcattgcagggtgctgattcatctgaaataaaccttcagtactttttacctttttgtggcttgctaccttattcatgctgtttttagattatcaaacatttgcagtttgattaattgagtacaaattttatgaaacctatgtataactataggtatattaatttatttaagacacgtattatcacactatatatagaataccacttctcttgctaactttttctgacattttggtaatagaaaaaaacctccaatccaatacgtccgttgtgagatggaaggatgtgggactgttcttgctcaccctcgctatttgcaggtcagtgaagatgtcacacattgcagtctttcatgcagtgtccattgcttgtctcctaagatgtcaatttgtgtgctaattgtaaacactgacataaaatctgaagaaaaatattcctaagtataaaattgcataaatcgtctttactccacttgtacttctttaacagtatatctgaaactagtaatttaaagaacaaatgtgttggcttttgattctgaatcccttagaagtcttaagaatgtggtaccagcatctgggggctcttcttacttcatcgccgagtataaggctgaaggacaagaaggaagcatgaggagaaaacggggatctgagttcactctgttaacaactttaatccatttgtgaggaaagaacacgtaaacatatctcagcatttttgcattaaggacttaagttttcaacacaggaaccttggcggatacaattaaaccttagttcattctattaaagaaatactaatgaagaactaaaactcccaagcccaaccaagtacaggacttttcttgagtttttacagtgttacaatatgccccaaaacagtgtgaagaattctgctttaacagatcgttgtaacaatacacaagacacataataataaattttaacttacatattaggataaaatgaatatagcattcaaaccagcaatttctttgagatagtccaaaagtgattttttaatttttggtcttctaagtttttccttaagtgaatagatatttagttggctgtgtttctgggtatatgtataagtctggaagaaacagggaattgaaatagtgaaatgctgcttaggaaatacctgttagtctttagcagtaagtataaaactaagatcttactgtggagtatggttctgttacagtaagtatagctactgttttttggtttttggcatgtgccatttggtataacatttattatgtttctattttacaaatgaaaactagaacttgaaatgtttaactgtgtctcagatcacattgctagtgagtgacaagtgcagattggattcaggtctatttcataccccgtgttctttaccattttactctagttttccttaactttttttgatttaggaaaaaaaaaaagaatgttgagaaatcttacttacttttcactttccttttgctattttagcaccacattaaataccagcatttgctgaaaaaaaaatatgtatgtccccatccctcctgtggacgactcttcaggctccagaaacaacttctgcgacatgccaaacatcatacaggtacatatctaagttaaaaggtttatcatgtagccaagagaactgcagtttgggcaagtagtctggtaatgaatcaagatttttctagtacaggtcttcttaaaaggacctaatcgacaagcatgaaaaaaagttaggaaaataaaagttataaacataaaagtttaaatgtgccatttttgagttggacttggtcacatacatctgtaatcccatcactgggaaaactaaagcctgagttgcaggccagactggactatgtagatagagcctgttgtaaaagctaaagatagaggaagtatgaggtttcattaagaagtcttggctgtcctgcaactcactgtggagaccaggctggcctcatactaccaccagttctaccatagtttcccagtaccatagaggtattgggattggtgctcattgctttttctagtcttgaaataactgtgttgttgttataaagtgcttgccccacaagcatgaggaccagagatcagatattctaggacccatgtaaaagccaggcaggtggcttcctataatcttagcacttgggaaatagtttctctagggcagtctgactgactagcaggaatcaatgcactctgggttctgtgagcaatcctgcctcaaagaatgaagtggaaagagctctcaaaagacagaacttcagtttcaatccttcatatacaccatacacgtgtaaaactaaataatttacttttttaacaaaatgaatattacagggtatgatcagctagagctttagaacttttactgtttgacttctaagaattttttttcctggcagtattgctcttttactaagcatatgttctatgctagctgtgaacttaacatatagctatgctaatctgtctactcaataccactaatctgtattttatgcccaagaacccagaagtttagaagaattaagcaatttgccaattctgcttcaggtagatatttatcagcaaagatagaaacttggtagtagctattagagaataaaagtagaatgaacataatgagaaagcctaaaaaagtaaaggggggttggtttattttttctattaaatagctcaagatgattatatttgtgaagatcataaaagctggtcactggacttgtttgttaattcctatagaaacaactcaaaaacagaagctgactaatatgtattacagaataggctcaaattctattcctttacagccactgacaattttaatgaaattctgctttcaacataatttgagttgcctgttaatattacataatattaaatggatatatctcacacttgataattacatatattctctcctcagtcttggacagtaagactaaaagttccccttgaaaaaatatgtccctcctgataatgatgtacatactctcacttaagtaagttacttttcacttttccttaactataaattataggtaccaatatgacagaccaacttaataaagatatgagctaacatgtgtttctaaatattatatagaacttgcaacatagtagacatttgcaaactaccagtctatgaactcttgtgtgttatgggaactcgaatattcagccaatagtctttgaggtaccggcccctggagtcaggtggaggcaggaaggtagactgagtccgtttcaggtgtggatgcaggtaggatggggcattgagcaaaggggacaagcattcaccaagtgcacaagccactagggcaagttccagctgcctaccaacacaggagggagtcaggtatggtccacttgatccagcgagcctttgcaggggctggacttttctgcccttttctgagagctctgaggtgctggtgggataggtagggcccctgcttggggcagtttgccactttggggcctttagtgttctggccaatggtcaccatattgtaatggatgattgtaataagagtccacaagagcccggaataaagggaagtcaggtatttatttattggggatcacccacaaacaacaaagtagagatccgctgggatcttctgcccagaggcactgtgatccatctgtgaccaccacccaagaagcagcttgcttcccagtccacacgtagcatctgagaccctgctcaaaagcggctggtacctcaaagactattattggctgaatgagttcccacaaaacttgtgcatcatttcttcatactgtatcaattgagaaaaattaaaaaagaaaaacatgctgttttgttccctaaatacatgttatactttttttgttctccctctgtactgtttttgtctcactgaaaatcttcctgacagccagtttcgaatattttaggtaaatatcacaaatctactatgagaaattttttaatgtattctggttcaaatatttatatttggttaatataatttcagaatgttatcttttcccttggaagttagtatatgcagacacacacaccctttgtaaatgtaatttatcaagtgggtgccctacacattttctgtgctccagggaaactgaaatattcggagctggctgtcaagaagactttaagagggacatcagagtgatgttgatcctatagaactatattgtgcaacacagaatagccattggcaccatttgggttttttctagcattctctcatatgtgatgaatcaacatattcattagtatctccaaggtgattgctacgtgtgttcaaatttgaggaaaaacatagctcatccctcagctttctgaatgagccacttactgtatcttgctggttcacatgttaaagctacttgggaatgaaagtaggtaattgttattgacttaacctacatgtttttactgtgattgcaccaaatggttttaaattgaataaaaaatgcagtggttattaaacaaattattcaacatatctttgtcctttggctccctgaccaagtagtagaaacagtacaatgatcctttatgtcattgattctaaacgatgctagattcgttaagtcctatgaaacttgatgtgaggaagggagttagaatggaatgaggaaatacttgaatggtgcagaagatgcagggtggcaaataagataaagaaatacaaatggcatttacatttttttgaaatatctggctatcattcaaccagaaatggtacggtttttactgtgttagatatgaatcaactttttccagtagaaagccatattgttttttatttggattttttttacatgttagatttgtgtgtgtgtgtgtgtgtgtgtgtgtgtgtgtgtgtgtgtgtgtgtgtgtgtgtgtgtgtgttaacatcttctataatctgtaatggatattttaaagaataaatcccatggaaaatgcacttaatgtctatcttaattactgttctgttgctgtgaggagacaacatggtcattgcaactcttattaaagaaaagcatataatttgtgagcttgcttacaaggtcagagttagtccattattgtggctgggaacatggtagcaggcaggcatggtgctggggaagtagctgagagctcgcatctgatacaagagttgcaggccaagaggctgttcctggcttgggtttttgaaacctcaaagctcaccctcatcgagtcttttccagcaaggccacatctcctaatctttcctaaatagttcaccagttgggaaacagacattcaaatatgtgagcttattggtgccattctcattcaaaccaccacaaaatcctaagcaatttgttcaatatttggaatgttggtacaaactgggattgaggttctggtttccttatttgtacctagatttttggtttgggtgggtgggtttggtttgaggcaaggttaactatgtagccctagctgacctggaattcactatatagaccaggttagtttcatagaagaaatctgaatgactctgcctcctaagtgctgggactagcctgggttactccagtttatacactaacatctcaagatttggagctaggaaccacaagtgatagagaatttttgtctttatgaatctgggtcaccccactcaatgtattttctagtccaatcaatttatttgcaaatatgtaccacattttcattactactcattcatcagttgaaagacatttagtttgtttccatttcctagctactctagaatagcagtaaacatgactgagcaagtaagtacctgtagggtaggatgtcaagtcctttgggctatgttagagtggaatagctgggccatttggtagatttatttttagctttttgaggattttccacattaattttcaaagtatctgcatcagtttgcaatcccaacgacagtgggtgagggttttttttttttcctccatttagcatttattgtcagttgttttgttagtcattctggcagggataagatggatggaattgtttttatttatatttctctaattgctgagtatgtacactttatgatatttcttggtcacttttatttcttgttttgtaactgcagatctatagcgcatttttcaaattgatacttatcttgattctttgtttttttgtgtgttaggtatatattctaaatattaatcctctgtaaaatgtatagaaggcataggtccttacctgttccataggattcttcttccctcagttgttttattagctgtacagaagctttgatttttatgagagccctgtgatagtttgagtgaaaatagccccatggggtcttagagactagcacttttgggaggtagagccttattggagtaggtgtgctactgttggaggaagtgtgtcactggggataggcttgaggtatcagaagttcaagccaggcagagtggatcattgtcttcctactgccagatgtaaacctttgagctacctctcacaccacatctacctgcatgccaccatgtttcctgccttggcaataacaaattaaacctctgaactgtaaggcagtcccaattaaatgttttcctttataagagttgccatggtcatggtgtctttcacagcaataaaatgctaagagagcccacttatcagttgttttaattcctgagcaaatagagttctattcagaaagactttcctacatctatatcttgtgttgtttttttgttttgttttgttttgtttttcctagcaatttcagtatttcatgattcatacttaggtctttgattcatttgaagttaatttttgtgcatggtgttatatgtgggtctgatttcaatagatatctcattttcccagcaccatttcataatgattctgtcttgtttctagtgtttgtgcttgggatccttttatttctaaattttatagtcaaatataatgtaattgttgtataattaaaaattattattgctgtaataaacaccatggcccaaagcaccttcaggaggataggatttattttgcttatacttccgcatcacaggaagtcagggcaggaactaaagaagatgccattgaagaacattgtttactggctaaccccagaacttcctgcccatgggtggcaccaaccacagtgaactaggccctacaacatcaatcatggcctgaagtaccacaggccaatctcctggggctcagttgaggttcctctttcaaaaaaactctagcttgggctaagtttatatagtattagatagccgagtgtcttcttcaaatatcaggtggctatagttatgtgcacatgtacttgtgagatgttcattctaagctgggacctctaaaagatacttttattcttagggaatttcataacaacattatcttgattgtaatcaactcctattcctcccttgaactcctgccagacccacccacctccagtgtcctctggttttttagactgtctcacagtagttgtcttgaccctctgcctttcaaaatctttttgtgctacttcctggttttgatgggatttgtttttatttctttttctctatttaagacagtggttctcaaccttgctaatgctgctacccttaaaaatacagttttcatgttgtggtgacccccaacaatgaaaaaagtattttcactgctgctttataactgaaattttgctactgttatgaatcataatgtaaatatcagattgcaggatatatgatctggtatgcaacccttgtgaaaaggtcattcaacccccaaaaagagttgccgctctcaggttgggaactgctggttttaagagaatgttcactgttttcttatataataaccttattgctttcaggtgtgttctttccaaaccctcacttccagatttttatcataaaagcattttggattttgtcaaagacttcatttgtctactgagatgatcttgtgttgttttaccttaagcccatttatatgatttgtttactcacatatattgaatcatccctgcatctctgggatgaaaaccaacttgatcatggtgggttatctttttgatatgtctattcagtttgcaagtattttactgatttttgcatctatgtatgagggatattgacctatagttctatttttgtgtatgtgtctacctagcttgagtattagagtagcactggcttctagaattataatttttaagctgatttttattctactgaatacatggatgaaaaataaaatcaaaagaatattttttgttgttaaatttagcttgctcgaaatatttgctcttttgcagagggtgttatgtgctggagacaatctgctagaagactcgctcacctgcaaactgcagaaaatacttagcaggtgtcttaatggaacattaaccacattatttttctccttagatcagagggattatatctgtgaatattgtgctcgggccttcaagagttcccacaatctggcagtacacaggatgattcacacgggcgagaagccattacagtgagtatttataattggtgaatatctgggtaggagtgcatttatctcacttggaggcctgttgtcctttataaacattccagttgtcactgctgtttttacttttattaaattaaagactaataattggggattttttcctttgttttgctgttctttataaatatatttttattagtttgagaatttattctgccttaaccacttcccattccacccatggaatccagtttgtgctgcctatgtatttgtgtatatataaagtttcagttcttacctggcccttatttaagaattctctgcttgatcgttcatttcctttggatttcctttagatgtgagatctgcggatttacttgtcgacaaaaggcatcccttaattggcacatgaagaaacatgatgcagactccttctaccaattttcttgcaatatctgtggcaaaaaatttgagaagaaggacagtgtagtagcacacaaagcaaagagccaccctgaggtgctgattgcagaagctctggcagccaatgcaggcgccctcatcaccagcacagatatcttgggcactaacccagagcccctgacacaacctgcagatgctcaggggcttcctcttcttcctgagcccttgggaaattcaacatctggagagtgtctactgctagaagctgaagggatgtcgaagtcatactgcagtgggacagaacgggtgagccttatggctgacgggaagatctttgtgggaagcggcagcagtgggggcactgaagggctggtcatgaactcggatatactcggtgctaccacagaggttctgattgaagattcagactctactggaccttagtgcaaaggaagactttgggcactgggacagtgcagactttgtatttaaaagataaaaaggacaaaaaaaaaattcaaagcatttaaaatctagtaaaataactgaagggcctgctctttgcattgtggatcacagcacacacacatactgtctatctctatctatctgtatctctatctctctatctctgtccccttcccctgaagttccctccctcatccttaaaacattgatgttgcctttaccagaaaggtcattgaaaaagcagcagcgtacttggttccagccatcagcagtagacttcctgctcatcagcagatctccttttcccaacctgtaactctgatattctctggatcagcttttaactcataatagtatattactatcatctaaatactttctcctctactgctgccctgtggctctggcttctccccactgcaacaaccaacacttatcctcaaatattatatataattctattttccagaggctggcaatttgacttggcactttagggccccttagcaggatgctgttaaaacagcacacatctctcacccctcttccattactcactgggtttggggaaggaaggatgatacatggggaccacctcccttccccttcagtggatcccagcacctcagtccccctcccaaacctccatatggctcttaatggtgctcacttgcttggaagcaggctcccaagagaggggactgccctatgaacagtctttttggctgtaaaatggggctctatgtcagtgagaaaagtcccaggctaatggcagaaatttgcactttgaacatgtgtgtttttgtgttttggaacctgagattccttatttattaatggaaagtctgattttttggggggagggtctttgttgctatgttttgtggggctgggagagtagattattctgacatgggatccttcctacaagaggtactttgaaggcaaggcttagagttaaagaagcacagccagcctctaaaatcatagttttccagtggcctttaaagaaagctggtcctcagcactaacagaatcactacagtagcctagtgcttttttgcaagccttagggaaggctgataggtttatggtgactagtgtgctctttgagatacaaggatttgaagggatgaggaatgttgttgttcaaggtctgaatcacacataaaagatttttttcttctgtgaatttattttctctttttgtcctcaccatttctttacatttatctccctactgacctaactctggccccttgttttgattttggttttgtcattggccattccagctctccattagtaggagaccagaccctgtcattcatgaaggaataaaattgaagagtcctagagttttggttaagagaaaactgacttgtttcccctttagaaaagacaaaagcaaaggtgaaaatctgtgtgataatgtctttggctttccccaaattatctattttccttggagtagggattttaatgcattgtgaattgtttatttctgtcattgggagacacagatcgtgtttttatatgcttttacctctcagaagactaaaaccctaattcagctcatttttttttgagaattagaagtgcagctcctccctatgtgcttcagaatctgccattgaagacctggccagttgttgtcagaaatacatgatgactgttgggaaaaataagagtctgattgagaacaaaataaggaacagcttgtttttcacaaacactaaaactatggagtttatcaaattttctctgcttaatttttctcccccaaaaaatgtcatctctgaaagacgcttactgtacacccaccagtgtcactggttgggatgccaggaggagggaggaagacacctacaggaacaatcttaaacacattattgtttcctctagtgttgcagactttgccatccctcccatggtgaggggagagaaggcataaagacaggctttcctgccccactgtttgcagtttactttggtacattggtacacagatttgaaaatactgtaagagtaattataaatgggactgcaacaaagttgctctatgtgatactgtttctgtaactaatgtttgtgtcctacacttaccctttgtttttcacatttagactgtctccataaattttacttagaatggttactcatcaaatacagccacccacagaaaagcaaactgcattgtaaacatctcttctttctggaatggggaaaaatatgttcttttctgtacctcactcccctccccatgaaagcaactagatataataattagaaacttcctggcctctcatttgggggagcatgtgtaagggagctgggtcatcttcatagctaccattgatgacaataaattattgtagcagtttgcaataaattttaagatagttttcatgaactttacattttttcttgggagaacaagtgctagcatagtaaaagtatatgagtaaactaagcaccattcccatttctttcctttcttcccatgccactcatttaattgtcctttaaggagtccttttaatcttaaaagttggtagatatttcatgctcttactatcttttaaataactagtcatccctccaatatcaattggcaatcctaaattttatggatatagttgtgataattattcggtatttctgggagttatgcatactccttgcttgggttgctggtgtattttgcataaccgtaacacatttcacagggtttagtcagacactggctgggagtcctggggatgagcacggaatacattgtcatagagcacttggacctccctcacacctgtttggaggaagaatgtgaactctgccaccaacctaagtgaggtcttatagcctcgcagcagaccagttttgctcctgtctttcttccaattttccatatacacaagaaaatcagaatattgtaatggggcagttatatttcctgaaatctcttttgcctgttgaaatgtgcaggacccttttcctgtgatgagagataggtggttacttgatctaggtttaaaagttatgtaaaaaaaaaaaaaattataataaaagggatactttgcttttaaaatcttgtttcctcttaatctagttaatcatattcaaaataagtatgtaaagaagaaaaataaaagttgtcttcctggaagcaactggtcggtcttggttgtactgagttagtcatccgagagtaaaacagttgatgctgctaaatgaagaaaacagatgcccccagggtaagcttttgtatgctgctagttgctctttgttgagagttgggtagcggttctaatgctgagatgccttgtagctctgtttggcagactccaaatgttgtttcagttgcttacttggggatgttaaaagatagtaggaaatacattttactctgatgacagaaccttggttgcatttaacatcagtgcttcttgacaaacttttaatacctgtgtcaagttctaattttaagaaagaaagcatagtgtaaccttggtaaaagttcaatggcagtctttcttcatttattgtttgccgatgtcaatttgctccttagatgacaagtgtttgaacttcttggcaacatctgatgtgaaatagggacggtcacagacccgtttgaggatgaaactttgaaactttagccaattagcatcacccactgagtgcagtacaatagaatgacagatctgtaagcaccttttaactcttttgtcctcatttcaaagcctgttcattctcttgtttagcatggagtatgactgggactgggaagaaaaagaagcgtgttgtcacttgagtaagactgcctgagaaatgttactaagttagagttgggtgtttcctttgggagagaacaggcctaaacagtgccttccacatcctgtagctactaggaaggcaccatgattgagattagagatgctcctttacctaatttctaaacaagtttaaattaaccttgtgaagaatggggatggaaagatgctaccaaggacttgtatcatatcatatagtctttgtctctcacaaaacaggaactacacaaagaaatcgtaaaaggggtgggggggcggtgaatgtacccaatgaccagagcagaaacaaaactctagtttattggattaccttttttgatgaaagtttcttatatcaaatgagaaaattattatttgcacccaaagaatactaatctttagccccaaattagttttaagaatcaaatgaagtttaaatgctataaaatagtatctgacccatttgataaatggcacctaactcaatacattttgccatactaaaaaatttagaatgtaaaaagcagaataaaataataaattatatgtgtaaataacactacattaggcaggggtgggtgtcatgaggattagtgtgatagtgaccttgttgctaagtacaaaagcaaaacaatgacataaaaacaagtgctaagaactgagtggaggagagagatggaggcagacactacggaaaaaaagactgattaaaaagggccctttgattccacaggctcaaaaatccacagccaggaatttgctgccacctctgagtcaggcagggggtggggatgggggtgcacaatcccattagagaatgcccagtggatttagtctgtgggagtcacatttcttatttggcccagtgaagacagaagcaaaccagctcacttgtttcctgggacagttgatttaggggatggctttcgctgagcagtcacctctgacccttcaccgccgggacctctgtagccgttctatctggctagcaaggaagattcgttcagacctgactgctcttatggaatcttacgtaagttgtctattttgctgttgtctgttttcaactcttctaacccaacatttaaccgtcatgttccgaccccataaccaattatctagtcttaatggtcattcaataaacacctgtaatttggcatggcctctcccttgagaaccttaatgtcttctaggctgtttaagagacaggactttccttgaatgagaagatacattatttgattgccttttttctgaatcttaacaggatagacagtaggcttcctatattttggtccttcatagaatttttgagctttagaaataaagggctttcaggattaggaagcactttatggaattttagagaaatgtatagtttccctctgtgcagtataagctacctacattttagttttctacatcagaagtatacctgtaactgaatagatttatcaaaaagattccctagaagattcactcgagtcttgtgaaaatgtcaagttaaccattctagttctgggcttgttttctcatgaagtacctctatctaaaggcctgatttgataatattccaggcctcagataaaattacaaatttatgttctctaagaattgataacttttgaaaagccttaccatacataagactaatatttaattacccttttaaagccagtttctgttgtattctaaaggatcaatctcaccttgagagtggacattagggataggaaaattcaggtagtgttgtaggatcatggctcaccaaatgaagggtttccattctagacattttctttacaacttgaatcattgactatagaagtaagagagattttatttatgattgaagaaaggaattgagatgatgcggagcatatcatgttttgctatatccttggccaggtgaagcatcagggcctgaataaaaatatcaacctggactctgtggctggtgtgccagtggcaagcactgatcgttggagtgagatgactgaggcagagagactccaagagaacctccaggcttatcgtaccttccatgggatgttaaccaagcttttagaagaccagagagtacatttcaccccaactgaaggtgacttccatcaggcaatacatactcttctgctccaagtttctgcctttgcctaccagctagaggagttaatggtccttatggagcagaagatcccagagaatgaggttgatgggatgcctgtcactgttggagatggtggcctttttgagaagaagctttggggcctgaaggtccttcaagagctttcacagtggaccgtgaggtctatccatgacctccgtgtcatttcttctcatcagatgggaatctcagcgcatgagagccattatggggccaaggataagcaaatgtagcagctaccccttctctctcttttgttctggtgaaataggtacttccccgaggcttcattttctcagaatcaatttttgaaaaccttaagccacagccattttcatcaagtagggttgacccacatatgaaaaggtggatatacagggttattctgggtatatgcatatgtgtgcatatgtttttgtttgtattgatggtatagtagagtagaaacaagagcactaacctcccacctttgtgctttaatgttcctgatgctaagtgacctttctaggcatttaacagccttacaggcagaagagaaagtgtaactagttctgattgacttcggcaaagactgactaaacaatagaagtcctagactagcgccaaactaccataaaaatagcattgctgtgctgaggcaatgagtgtgccatcccttttatatactttatatataacttgacatctttgtctcagagggttagaagatggttcttgtaatctgtccctagcactgaaaagcagcccttgttacacatcctcagaagtcaacagcagactgccatccacaagtatttgttgctcacacctgggaaagaacagcaactatacatcttcagattccatttggggggaaaaaaaatgggcccactctacttccatagttggaagctaaaggatatgcaatagcagactgggttagtgttgactaatgtacttgaatattgagttaatgactctttatagcaagtgagcagatgagttatattggtgctataactaggtaatcgcagaggatggaatgctcaggttaaagtgtcatagagctccatcaccttacattctctgcgcttagtcatgaggggaggatgaagtctacttggtccccactgagaatgccagagattcttaacacagtaattctctgcttttaatgttcttgtgagagccacacagcatagaagactaggaaacagacatcctcatttgcagtgaggcctgtgcattaatggtgcattgtgaatccaacaatttgttagtttcatttgttttttgcttatcttcagttaaatttgagagaccttgagttgggaacccaagtctaatgatgacatcttgctttataaatgcacggtcttgtaccctcttctataaggggttccatacaggctagaactctaatcaggtacgggacaggattcagccaatcactgtagtagctcgggggaaatgagaccctgctttctactatgcatttgtaaaaatacagttccttatgtataaaataaagaccaaaattagggtgagattgtacaaaattgaaagatcaattaaagctacaaataaatgtactgcctgggttggtgaagtacattatagaatagactgaaaaaaatacaagagttggctcatgaaaacaaattatacaatagtaaacatctggaccaagcatcataaaaggcctattttattctattaatgatttcggtatagataatttttcatgtttagaagggcttatttcatttgtgctattaagttctgtttgtcagcagcattttccatttaataaagtatatattaacaaggttcatggttaaagaagaaaagtgtctaaaatttaattatggggaataacaagattatgaacaatttgcgtcatgagtgacccctcttctagggtttctgtgtctcacagacatgacagatacatggcaggattttcagaaagcagtgcatatgaaagaatatatatgtgtgtgtgcgcgcgcgcgcgcatgagtatgcgtgtgtgtgtgtgtgtgtgtgtgtgtgtgtgtcaagtggaaagcggcccagagacagtacaaatattgaggaaaatgtgccagtcctgtagctcacagcaatagtctcttgagtgccctcccctactatgttatcagattcatcttcaagaaacttggtggtgcatgatagcatccggcattcaggaagctgaaggattaggagttagagagtagcttggactatatatatagtaagaagaatgtatacatgcataccccaagaagaaacttagagtgagtatgcctcacagcagtgtgtaaaaccttcagaaaaaagggcctagaagagtgaatggggagatgtcttcatgggtaagagtgtttgtcctgcaaagatgaggacaagagtttgaataccaaaaaacatgtaaaagctgagtgtgactgtgtgtactgtaacaccagcattagagaacagaggtagagtggatcatgggagctcactggccttgccaaaacagtgctctgtgacaccgtttcaagacaagacaataatcgatgaagacacttttggcacccctctctgacctgagcatgcatgcagactcacatgtgccacacacacaacataaattaattttaaaaggagggaggaggagctgagcatggtagtgcacacctttaatcaaagcactcactctggaagcagaaacgggaagacttgggagttcaaaatcaccctggtccagctctaggattacatagactgtctcaagaggtaagcaggaataaaagtttaaatgggtatttagccatataacacaaatataaacccatgtgagagatgaatgtattgaccacatcattgtttaccagaaatgtgtaagattgaataaagggttgacaagtgccaatgccctagaagtatcttaatacaggtaaaagttttgtgaacatagtttgttgtttgattcttgcatggcaccaaggatcttggctgggcttggggggtgggagttggtttcagcttgggacatgaaatccagtgcctcacataataagcgaacactttacagggaactccagtcccagcatttggaagggtatagtttttaaggattcacaagttcagtgagatttttctttagattttattcccttatttcaaagtcctgtccatggatagaatccctagaaaaccataaacaaattcagttcctcacctttaacctttacattgttttaaaaacagattctacacacacacacacacacacacacacacacacacacacacaaaaaaaaaaaaaaaaaaactctctaaggagggagattgtttccctgatttgtatggatgaagcctgacaaattatccttaagatgatgatttgaaagacttctaaattagcacaaatgtgaggccaagcatggaaaagaatcagctttaagatactcggaattgagggaagggatcactgagttaaacatgcagagtataaagtcatccctggtactgccttacttcaggctgctgtagatgaaactcgaaaggatggcactgttgtgacctctggccagagggaaaaaaatctaaaaagtagtttcaagtgatttctgatcgtgcccccttgggtcctccctcactgtgtaccagagcatcagctcaaaatttttggcttttattaaaggttagcaacatagaaagcaggcctccaccaaaatgaggaatagtaggggttgagttgagatttcaattgattgtggtgtgtgtgatataatgtggtttgggaatggaactctaaagagatggtttgacctcaacttcaagcttcatggtctaaaatgaaccgtctgaatgctagtgcattcaaaagtaaaagggagtaaaaacgatctcagcacaaaaccttttacagaattctaaatatcactgataaaaagaaaaaaaatgaaatgtttggtgtttaaaataaatatccatgtgcttgagattcttaacaaaagattgtttcttggatcaatctattttgggcacatagaaaataagagatgctacaatggctaacaatagagttctcttctcagcaagaccacaagttgcttcttttatttctgtgtctttggatgaacaaggggaatttcaagtgatttcaacactggatgaaatgtaatcctctcagccaaggccaggctcaatcaagcatgctgggtaaatctccatgatgccaggccactgggcaaaagtcccaggggcaggcagcctgcaaaaggctgagtgcccctacattaccaggcttaatgctcctgcaaccttctcaatatgtagttcaatcgcctaggtcgtaaatgaagatttggtttaatttcaaatattttattcccagccagccctttggctgagaaggatctttgaagagtctgtttctagttattttagaggtagaaattaagttgtgacaaaccacataggtgaaaataaaattgctgagtatgtatttctgtctgcatgttgaggtagtaggaaagaacaatgcatttacttagcatatgagacagcttgacactctttcgtgatattttaatcctttgagatagtaatctactttcacagatgaggggaatgacaatgggcattaatttgttcaagttcattcctctagcatatgacaatactaaagttttaattctagtctcaaaactttgagatacctggtgaccaagatgatccaattctgaaatccaccctccacctctacagttcactttccttggacaaagccagtaccaacttgtcccaaagggtaacaaagccaagttaagttcccatcctgggacaagtcactttctctgagctcctcacttatgaaatggaaaagatgacaaatacctgacctcacaggttgttatacagttcagacaaattatctgtatgtacttgtaaatggcttgtgaacttaagtgtgtttaataactcaagtagcttagattcaagttacactttggactggggtgtgctctaaatatctcagagaacatcattttcttcccaggatggacatggtggggtcataacctagttttcaccttgttgactttaggctccaaaataacaactcaacctcatcccccccccaaccccccagaaatcctacatctttgtagagtttgagacacaggctgttcactgttcacagaagatggcttttcctgtaatatagtcagacaggccctggagacacctggcaggctctagactggggagccaaggaaacatgcaaacctaggcgccacccaagatgtgttaaagcatgcatttagactcatctctcttatacccacaccctcctcttaatacaggaaggaactcaaaactatttagtcctccggtccctttattaggcacctagtgtgagggaatcacagacattccaaaatctgtcccaatatcccagctccaaagagaataagaactgcagtataagtctgcacaccacacacacacacacacacacacacacacacacacacacacacacacacccctttgcacaccctggcctctccattagaccagcttttggaaggcatcagctgtctgtctcatcttctttatgttacactcagcctcttgagctcctgtacctctctcttaataatcctttgaagctctagaactcttaactcctttgaaactcaaggattccagtacttgggacccttcatagctttagtcactcataaaacagatgctttttactcctcaaccacaaactctattggaatttaatggtcctataatcccatccctctctgacatgatgggagatgtagaatacattctaaagtccttcccaggactgaaggcacccacccaaagaagactttaaaaagtatttcaagaaaggtgtttcccaatcaaatgtagatttttatgatctttatgtcataaggctaggataagagttaagatatttctcttgcttaacagctaccaaaccaattcctgttcccaaaactcaggctagcattagggttgagggtatataaataacttgaaaggtcaccagaataatgccattattttcaaactaagctctaaagttcaacttttagaagttgcctgccaaagttcagccaattttaacagcaatgcattttgacaagactatattggtccctgctgatgcaggagtgaataataaagataagtgtatgtgatgtttactctatgccaggtattgtccaattgctttccatgcattatctcgtgtattcctcttcaggagtacgtaagatacatcgaaagatccttgtttttacagaggaaacagtggaggcatacagttgatcattgatcgtatttgaaacactcatcttcccttggaaatgatagcaagaatacaatcatgaagaatttgggtgtgcttagtcattcatatggatatcccagaactgtgaaaacacagaaaacacgctttagaagctgggtaccctggaagttgggcattgaaggacgatgaggactttgcccttaggaaataataggagggagaggcaggcaggagcacctcagttagatgcagtggcacttgtcagggcttggctactggaaggcttgtctgtgacccattcagtgtggctgaatctcagggcttcctgggagtttcaaagagaatgaaactgagggagggaaatgatgacaccttggaaaagaatctatgaaagtcttgaaggtgaagagtgctagcatcaactctttgatccagaaagtatccaaggcagctgtgtctgccctggagctgaacacagcgggaggcagaaaaattaactcaaaatgtgctgtttggtgctcaaagtaagacatgggaatattggagctaccaggacatagagacgaacacagcatagctctttacttctgaagtttgtattctagtgagtgaagacaagcaacatagaatggtaagatattggtaagaattgtgtagaaaaagtaggagttactgagagtagtggccacaaaagcaaagaggaagaatccacgaaggacagtcctctaggacttcattccttctacagatgtgaggatcacatgaactttcctagtcaatgcagaccccacagggaaggaaagtggaattataactgggagattgcattttctttttacagtattttgttggtaaacaacttcagcaacaaacatcgggttatgtaaaatagacatgatctgctttctggccatattaaatgatttgtgtctaacattcttcaccatcttcaagaaagctttgctactttactctaccttcattttcagttgcagttccctgagatctgaattagccatgagtagatctgagtaaagatgctattaaatgcaaatccccacggcaggaaagacagagcttcttgtcttcaaggaaatgaaagtttgatggggctgaagccaacagagcagaggaggaatgccaaggacaaggtctttcagccagaggccaggagaaacacaatgctgctaagcagctgtgttgaggggaaggttttccaagaggaactgtgaatatttcaggaagagcatggtaaaaacctcaacagacattttaggctgtgattggccaatggagtagagtctaagcagagcagagatttgctctaattggacactatcaggaagtagggtagctaccatcacatgaagacagaaatttaagtgccttcaaggtcagacttcacccacaacccactatccaagacaaagagagcattggtgctagaatgagtgtcaatactgtcttacaagaggtggcgaagaactgggtatgttgatacatgcttataatccccaaacttcagaggctaaaagagaaggatcatgagtttgaggccaggtgttgacaaccaccctcactcatcctgatgacctaccacataaatgtcctgcgctgtcacatctttaaacaagcactaagcccatctttgtgtgcgcgcgtccaactgtgaaaatcccatatatcaagctggtggatgttcctgtgctgaacaccaagtcaaccccaaagaccacaagaaaccagggcaacaggtgaatctctataaaactgccccccaaaaggaagacctttaaaatggttgcttgagcttgtgcagtggttttgaggtgcagtcaaagaaaacttaatatgcaagaaacaacaaatatgtgtgtatgcaattttatgaggtgatactttataggtagtaccatgagcttctttgtgtctgtgtgttgacaaaagtaggaagtggactgttttgttctgttattgatgtcttggggtaactcagtttgaggttataattcttggaggttgtttacattgtctctgctcactgagctgtgcacctcagctaagcttgtaatcatcccagagtattgtggtggccacaagctacattctagccatcagcacttgaattcatttccctcactagtgacaaggttatgatggaaaggaaagtgatgagcacaaacaaacatacatatgattctaaagttggtgtgtgattaaccctgcttggttactattctttctagatagcaaagagcaaaaattcctacctaaaacagtgtctagatacctagtggtgggatcactgtttgtttctgatgatgccaaatccagaaaaaaaaacaaaccatactttattgaatcctcccctaaattaactagcataagtctgagtcctacagcaaatacctttagcatttccataccgaggtgtcccaaggttcatctgcagcaagccaataaatattactttgaatccatgcatttcccaggtaatatttacaagtaatcattggaaagttttaagtcggaagataatggaatttatattgttaaaattagcttcaggttgctgtggacagatgggtttgtgagggcaaaatcatggaaaagcaaaagttgatggcttaactcagaacagtgaccataggcatggaggggggaaaaaggaataattctggaaagaattcaccaaatgctatccaaatgaaagagcagtcaggtacaggaagtgacaaagtcagtatataatggaaaacgtgctttcatgccagtgcttcccagtattttccacagataatgacttctgtaaaacatcatggaataagttggaggatctagattctagggggaagctgctctaggctagagggaattggatcatggtgcatgtggtatgcctactctacgattgggttactatcatgataaagggatcagtacatctgggacaggtgctctctattaggggttagcaaacaacatttttaaaggtagaatgtaagtattttagaccaatgagctatagggattctgttgcaactatccaactcgcttattgtcccacaaaagcagttataaataataagcaaatgcagatgctatttccaatgaaaccttgctgcaaaaacaggcctctgtactttgagccactggctagtccacgttttacatgaatattgtacttcacagacttgttatcatcttctttcttccatttttaattttgatataatctaatttattcatctgcttttcaacaggttattttgatatcatacccagaaacctttgcctactccaagctcacaaagattttttttaatataatttatgcctccatgctttttctctttggcacataataaatggtgatctttaggaagaagaattaatacaagaaaagaagggatgaaaagaagaagaaaaggatagggagaaatacatggaggatttatttcaaataaaggcgtccctcccttctttcttattgtctctgcactcaactccccaagccaggcactcacaaaagttctttgcattgggatttcatttttgaacttccaaccttgttgacttattttacatgtaatttaggggctcccaaactttcagcactacagcatgactttttccaacatatatgccaatgttaactttcacctataattgccttaaaaacttacttcattgggccaggggttaagaacactggctgctcttgcaaaagtcgcaggttttgttcccaggacccatggcagctaacagccacctttaactccagtttcaggggttccagcaccctttctggcctagagaggcactaggcctacatgtagtataatacacacatgctggcaaaatgcccatacacattaaataaaaaatctaaaattaaaaaaaaagtttctgtcagccctcagtagcacttcccaggggaccaagtcttcagtgaacagaccttgaaaggacattgtgcattcaacctaggcacctacttgagatatgggattgattctcaaaagaagtgagacagtttgcacacagacacagctaggcagcagtcatactggaacttcagccggagtctgggttttgctctgggtcccattcttaaattagtttcatgtttggctcagtgcttagctgtggatctctgcttctacttccatcagctactggatgaaggctctaggatggcatttaaggtagtcatcattctcattataggggacaggcatttaaggtagcctctctgctattgcttaggttcctagttagggtcatccttgtggatctctgtatgtatatttccttagtgccagatttctctttaaacctataatggctccctctattagggtatctcatctcttgctctcctctattcttcccctgactcagtcttcctgatccactcctccattgctggtgggagtgcaaacttgcacagccactttggaaatcagtatggcagtttctcaggaaaatgggaaccagtctacctcaagatccatcaattccactcttaggcatatacccaaagaatgcacattcatacaacaaggacatctgttcaactatgatcatagcagcattatttgtaatatccaaaacctagaagcaacctagatggccttcaactgaagaatgaatagagaaaatgtggtacatttacacaatggagcactactcagcagaaaaaaaaataatggaatcttgaaattctcaggcaaatggatggaactagaagaaaccatcctgagtgaagtaacccagtcacagaaagacaaacatgatatgtactcactcatatatggatattagacatagagcaaatgattacctgtctacaattcacacctccagagaagcaaggatgaacctaagagagacatacagggtcccctggagaaggggaaagtgacaagagctcctgaacaaattggacgctcgagggaggggagaggagggtcagggaactgaggtaggagaaagaggaggggagaagaggaggggagaagaagctacagcatttcttaaaagctcctttccttttctgaggctccagttcttccctggtaaaataaagatattttagtgcccaagtaaaactatctctaagggttgtgtttatttttaagattttttaaaaaaatctgtgtggtgttttccttgcatatattgcagtgtctaaaaagtctagaagagggtctcggaacccctggatctgaaattacagatggctgttaactgccatgtgggtgctgggaaccaaatctgaatcttctgctacagcaacaagtgctcttaaccactgagccacttctctagcatctgaagttgtctttaaaaaaagaattagaagggatacttttcgtaagggaaattaggaaaacttagtaagcactacaaattattattactattgaattactaacattgctaattgagtcaaataatttctaacttatcatgtgactttgtataagtcagttaactgctctgagtcttggttttctctttttttattaattaaatgtttttttcatttattttacatatggactgcagtttcccctcccttctctcctcccatcctctcccccaaccccccattccacttctccatctctattcagaaaggagcacctctcacgagcatcaacaaagcaggcacaccaaattgaggcaggacaagagtcttggttttcttatcgatgagataggtattgctgtagctacttactttagggtttgtgaagattaattggaattttattagagcaagtgtctgtaaggtgtagtgaccaggttttagaaaacagtcaaggaggcaattcaggagcgcttccagtcatccagccctcggtgacagttacaaagtgcatcagagtcaaagtacaaatgataataaatgtcactgcattgcctagatttcaatttttcccttcctcttaagactcaggatttgtatcatttgtcatgaggaaacatctccaatatattccaatttgtagctatagtggttgaaacattatgacatgaaaggccctcatgggctcacctggattagggagttcttatcatccctgtgtaagatgcttctaggccaccagccaccagccaccagccaccagccaccaggatttctttgtatgtttcaggaattgattctaaacttttgttgctctaaacaatttctgggcccatttgaaaaaagtcctatgtgctctgctgtaagttagggcttatggaatatgatgaaacctatgttctaagaatattcaaaagtgaactacctacccaaagatttctgattggaattagaggaggcaatttgctgtagcttgtttgagctaagcagaatctccaagggaaaatatctccaatgatgaccgagggtaagaaagaggggtgcgaagttataccctcactgggtgtcatggagcatccaccaaaaatttactttcaaatgtttcactgcatctatagtttgaaatacattttacattctctctctctctctctctctctctctctctctctctctctctctctctctcctctctgtgacacacacacacacacacacagagagagagagagagagagagagagagagagagagagagagagagttgatggcactcactggttgttggagcctcactgccacttctatgacatgatgcctgaggctcactgccatggacagctaaccctactgaagctggaatgggagccctgctttgttggaaactatgcatggatgtagctaagttagcgatccgagtgcttcacatagaggtttagggttttcccccttgatgtattatgtgtatatatagcttggatatgatacttgccattctccatgctgaagcacttcaagtcatctcaatgatgagcttccatgttgcacagattgtacaaccctagcatctgtgagttctgtatttgcacttgggaagccaggattttccccatcttgtggtgcccaccgagcaccaggaattacagaggagcaaggcataggcttcccttttgcagctgcttcccagctcctgcttcgaattagggctgccaaagggggaagtccatcacctgtgacttaaaatatgcccagcctcggggtattgactcagctggaagcaggctccttgtcatgagcagtcccctcccaggttgcaccccagtgggaagaatagcaaggacaactcttatcagaagcatgcaagaatgaaacctggacagattccaggctttggattgtaccagggaaagatggtgaaaagcacacaccccaagggccctctgaactcagccctataacaagaaaaatattctcatttaccaagcacctagtattttagctccttgactctcgtctcatgcttaaggtagcatcctaccactaaagcctgtaaatgtgaggctcaggagggaactggcactgtgtacagccaggaacaagcttacttctggatttggaaagctgagttcctcttctccctgttaggccagcctgtgacacacggagcctgggatgtcacccttattccacgtggatttccctgtggactttcagcatacagtatagaactaagtcaggtaaagggcagtgccaacaaatgtgtggcaactgtgccatgctctagaaacctggttcattggcagtgtagactatttcaagcaggctcaacacaaccaaggattgagatttattgtataccataagccctagcttcctcacaacagagcccaaatacaagattttcccttgtactatcctttctgaaactttacagggacttcttttttccctgagacaaaccattcccaaatgagcctcatgagctagatgctctacaataccaccatattccctactgtccatcttttacatctagagaggccaagtagagtgccaaggtcacggaacacagcagtgctggtatttgcaaccactttcatttgatgccaatgcacagtttccactctgatctgtacttgacatttctccctgctgcctggggcacttgcgttttaaacagggttcatggaaaggacatgcattggttaccttttctgtaactatgacaaaatacctcaggaaaaaaaaatgaagaaaggaaagatgggtttattctggctcaagttttagggtatagtccatcatggtagggaagtcatgacagtcctagtggaggggatggtctcactgcacccgtagtcatcaaacagggagcaatgaacactagtgttcagcttacattttctttcctatttaggctgggaacccccagctcatggactggtacccctaccaggtaagggtcagtttccccacctcaattaattccgtctagagatgccccacagataagcccaaaagtctgtctcccagatgattctagattctgtaaaactgacaatcaacattagccatctccaagcgtatgggatactgctgataaaatatggctgcatccgggtgcttggagcaagaatctttcctaaccactgtgtttagggagaggctcactgtcaagttactgcttctgccctttacctctagaggtagtgagctggaacctgggccttgttattgcatcaagtgaactgtcctatcctcctaaatgtcttccctaggcctacatccctcatactaagaacaatgcacccctcttcctgctggagcaattgggtgtggactatcatcacagtgtatggcacagatgctaacatctcagagaggtgagccgagtgacttgaccaagacctggatttgatcttaggttgtccagagtgtagtgctcttctactccagcggttcctttcaaaatctagctttattagaagtctgaatgactcatgccacagtaacttggaattggttgtttgctgcagagaagctgttatttggggaaatgacaaagctgttttcgctcttggagttccttcccatgccaaggacaaggaatcaatgttgctttgccacttcctagctgagcaccaggcacaagcacctcgtcatcataagcccatgcaacgtcgttttgctattagcactctcccaggacctaggtcaagttaatgggcatttctcaaccatgcctatgaaagaaaataaacatactttgggctaattagcagttttgcatttgatgatttggaaaaaaaaacaataggaaggcaaagaaaactgtgaggatgttttcttaccagccctggggcagcaagtactggggctgagagattaggagggtcaattggtgcccagagctcatatcccccaattgttctgatcagtgttagaaatgttcaggctgcacagcctttggagttggatgctgaggccctgggtgaccttaacttagaagtatgatttcctttttaaaggaccaaacaggactttttagctgttaacgttaaaaaatgacaaatgcttattatgggaaattaaaaagagcaacggagttatataagatgaaaagatccactgaacctagctgtgttccccagagaaaacctgaaggtggtatataatccatgaatgcaggcatacagctagactcacaatacatatgccatttggcaaaacattgaactaggccatacaattttttacccacaagtaaatgtctcccagagaaagaaatgagtatagacagagcatatgaggagacaacacagcaaggctgagctgtccctgtgtctctgaaccttaactgtacttatactttagtccaccttgcatatttcttccccacaagtcccctctggctatccacattgttactaagatccacaaggaacacaaatgctggtgattagcactgcagatgagcatgaaaaatagtgaaactatttaacctcatgcaaattgcaagtccaatcaatcaggactaagaaaggctgcaaatggccttcctcaggttagttactggatctatatttgccctatttgtgggggctcagtttgtattctacacatctctaaataagaaccagtataagaataagaataatgtatcatggttttaaataatactctcctagttagcattaaaggccaacttgacacagcctaaaatcatctgaaaaaaagtctcaaattggtaattatcttcatgaaattggcctgtaggcatgtgagtgagggattgtgttgatggttgttattggagggcagatcactgtaggcagtaccattccctaggcatgtggtcctgggtgtgtatggaagcttgcagagcatgagacacacagagagagctaacaagcagtgtttctacatggtttctgcttcaagttcctgccatgattcccctcagtggatggactgtggcctgaaaaataaaagccaaataaattcttgcctaccccagtttgcttttgtttggagtgtttattatagcaccagaaaggaaactagaacaaatgtcacaagaaagaaagacacttcctttagtagaaacacaatgttattcattgactatatgttttacagattattttggtgtttggaaaaggagaagagaagacattaaaaaggaaggagttgaaagggagagtttggaagaattctgctgaattggggctttgtttatttagctctgagcttggtggctttgagaccctgtaaaagtgacaacctccttgccctcttttttttctagacacctgtccatgtgaggaagaggaagatatcaaagaataatttaaccagaattataccagttaagggtcagataaattgaggtatttgagggacttttagtctggcaagctaatagttcactgtcaaaggttactactggactccgaagttgggattttgaggtctttcttaccctcaattctaggtgaaggaggctttgagttagcatctccatgactcctcttccttctgggttcatccccacatacagcataccatatataggaaaaaactgcctaaaccaaagaagacattgaaaaaaatatgactgacaataattaactggctgtttcagaatatctagcaaagagtgcacaaagaaatgatctgtatctgaggtgataggtaaattatgcagatatgatcagcgcacattgtataaatgaaaggaattatcacacagtactgtgggtattaagtatatataattgttaggtgctgattaaaaatatggcatttaaaaattatcaagtcacttctcttccttctgaaagcaccagggaatcctgtttcttgcattctcctgatatttcttgcaataattctccacaagggtgcctacttgtggaggccaatgagataattcagttggtaaagtgcttcacattcacacacacacacacacacacacacacacacacacacacacacacgaccaccacaatttttgagccaaattttattcaagctttattaaacactgggcaggtctatactggggattcctagagtagggaagcaaattacgttagttaggagcttacaaaggcaaaatccgcaaggctacatacttctcacctttgtccaatcaagggcaagcatacatcctgacttacttcttgcctatgtgcctcctgctttatgtgtgatcaagcacacatcctatgcagttgaggcaaccaaacttgtttacagaagcaaaaacacttggcttgttatcttacataaacagcagccctcagcattccagaaagttttctgtccttgggcaaataggacttagaagttagaggcatttttgtcttatagatcccttaggcacagtaatttaaacataaaacatatcattagccctcatgtcacctcatctgattggatacagatattttctgtggtttagctttaagaagaccctaagtcatcaaagtgagagagttgggaaagagtcaatggagaaccctgaccagcatgtctggtcacaaaatcacaatggatgtggagcaaggggaacactccaccacagctggtgggagtataaacttgtacagctgtaggggaacctgtagccacgccttcttaggggctggctacaggtgtgcctgaccacgcttgtgagggcgtggtcaaagtgacatagtgtttgcgctttcggtttctctttgcttcttgctgtacagaccactaccatgccggctggctaggttgctctgtaagtaaggcttttccctattaaatacccttatatttctacctgactccgtattggtaatttcccactatatacagccactctggaaatcaatctggtgatttctcagaaaactgggaattgatttaccccaagacccagtgatatcacttttggatatatacccaaaggatgctttaccataaggacacttgctcaactatgctcataggagctttattcatattagccagaacctggaaacaacatagatgcccctcaactgaagaatggataaagaaaatgtggtacatttgcacaagggggtattgattattcagctgtcaaacaaaatgtcatcaggaaatttgaagtagatagaactaagaaaaaaagtctacctgagtgaggtaacccacacccaggaagtcaaacatggtgaatattagctgcaaagtaaataataaccatgctataatccattgatccagaagagaggcttagtaacaaggaggcccaaagcagaggggggagggattcatggatctcctgggaaaggggaaatagaagagatctcctgggtggagtggggcaggtggaaatgggaacacgaggggtcaggttgggaggcagaagtgggggagagtactgaaagagaagactggaagggggcatttcagggtcaaagagaaacctggtgcaaggaaacccccagaaatctacaaagatgaccccaggtaagactcctaacaatgatgcatatgtaacctgaactggctgtctcctttcacccagcgggactttgagtggagggactgggacatcagcccaactacacaacctttgacttacagtgtgttctgcctatgggagatgcagggtattggtgggtaccccagttgtcatcagtaactgatagaaacagatgcatggaaccccagtcaagcattggactgagctcagggaatcctgctcaagagagggaggaaagattatggaggggtcaaggacatcacaagaagacccacagaatcaactaacctgggctcatacgcactcacagagtctgaaccaacaaccagggagcctgtatgggaccaacctagaccctctacatatatgtgacacttgtgtagcttgttctgcttgtgggatccctagtaatgggggcaggggctgtccctaatactttggctggcttttaggaacctattcctcatactgggtttccttgcccagtcttaatacaagaaaaggagcttagtcctagtcaactagatatgccatgtcttgttgatacccatgggaggcctgtccctttctgaacagaggcagaggaagaatgaattgggggatggggtgaaggagagggaagggaaaggaataggagaagaggaggggaaactgccattaggatgtaaagtaaatgaataaatttaatttaaaaatatataaatgtgcaaaaagatcacatttcatatcagcattatatttttcccggagggttattgtaacctctcagccagtgtcccagccccctgaaggacactaggaatcttggcaccctcagaacaaaaacctgccctgggtccttgctgatggccttgatcaaaacttaagcctttcataccagtttatcaagctttcctgaactgaactttcaaaaaatgaattgtgacattcaaagtaatcacaccccaaagagctcaggcttcagaagtcactctccatgtcgcattcacatgctattaaaggtctgttgtcatcagcagcctagttaactcctgaggcaaagagaatcgtgaaattaaaagtgtttattgaggtattatagatatttttttcagaaaaggaatggcctgtaacgacctttaccaaaccttgtgggaaattgggactgagtccactggatctaagagctttgggaagcacttgggaaagtgtagggcaaatcgtttacactgaatatacattggctttagtcagaaatatatatgacacagaaggcctggaaaagcatcagggcagcacagttcccccaaagacttattgcttctgagttagttggtgtttgttccttctgaggtccttggtgctttcatctagaaaaatcattgtaactgattggtagcaggggtttgactctgcagtttgagtcaaggtttcaacacacattcaggaatgtggagcagacttgttgattaacttcccttatcttttcctctctctgcccttgccctctggcctttgtaattaagttggcacatctaaaacactttcttttatcaagcataacttcactattgcaaaagactctcacccagaccaatgtcttgatacttgtcataggaagttcccaaaatatccatcaagtcttcagtggaaagcccccaaagacagtttttgccctaagaatatgtgaatacacttaccttgttttacctccagccttagactgtggtgttctgtttcacaatcacagcaaaaccttcctttgctctcgtgacagaattgccttaaagaagttttcagttccacataatttcacatcctgtgtgctgagaccttatcaaatccctggtaagatattctgtcttcaatatttatattcatgatatttggggaaatggcatttggtagcccctagtcactgtccacaattagctctgagagatagtgggtgaagataggccaagttgctgggcctaatggtcaaggtcccaggtgatctgagcacatgctcacttcagatccatcatttatttagtttttacaaacctgacgcttaaaacgaacctcttacatgtttatcagctttgtgcttttacccatgctttatgctctattctctttaaaattttatttaaactattcattgagaatgatatatatatatatatatatatatatcaatgatatatgtcatatcaatcccacacccccctttctaattttcctcagatccctcatgactccaccaattttatcctctctctctctctctctctctctctctctctctcacacacacacacacacacacacacacacacacacacacacacacacacagtacagttatgggcatggtatagtgaaatgcactggggcatgagcaaccttcaagaaaaccaagtctcccttccccagcagccatcagctgtcaatagctctgagctgggggtgggccttgtgatttccttcccccacctacacaggaatgttgactgacttgatcttttgctgatcttatgcaagcaaccatcactgttgtgaattcatgagtacaatgactctgttgtatctagatggcacaattttgcaacattcccctgatctttgacttataatccttctgcccccaataccatgatgttccctgagccttggagagagagggagatatagatatctaatttgaggttattatgctctgttcttccatcaacagctagacaccttttcgatttttaaattattttttattatccatatatgcacacatgtgccagtgtccacagaggccacagtcattggatcacctagaactggagttaccggtgattattagctacctcgtgtagatcttgggaatctaattcttttggaagagtggtatgtgctcttaaccactgactagtctctacggaccctcactggcctccaaagcagtactcccttagtcatcctttccatctgaatatccccttgaaccctcctcccacagtgaatctgctctggtcctacgattcactttaattaattcaatatggtagacttgaagccatgtctacacctgaaacaacctggaagcttccacttctgggaacttgagccatccagctatttaggaagaggaagagatcacagactgtttacagaaaaagtttcagctctacccatgtccagctcatctcagccctcatgcttttttcccacaggtattcaacatgtaagagccattggacatctggacccaggtgagctcctagctaacaccatggctcagaaatgctatccaggtgaattgagttagaccacagaactatcagcttttgcttgcttgtctgtttttttatgctatgaggattttacctaggacctttgcacatgacccaaggccttgcacatgctaaatatatgctttacagtcagttatactcttagaccccagcccaccaaattttgtcatggtctactgtgcagcaccagatacttagattgttacactaccccactaccttcccataccacagctagaagcaggaatagcttagtttattccctgcttaagtctcccaaggggaaacctatcatttcctggcctcctggtaaacgttctatgaactcaatatatatttttggcaaatagacttgggctagtctggatgagatgtcctccatagcccgagtaattgaatactcggtccccagccagtatctggggaggcttagtaggtatggccttgcttgaggaagtatgtcactgtaggtgggttttaagaggacaaagacttgtgctattttgagtttgccctttctgcttcctcttcatgaaaggagatgtcaactctcagcttccagctccagtagctactgcctgtctgctgccattgctgccatgatggtgatggactcttactcctcatggaactataagccccaaataaaactcttccttctataggctgccctggtcacagtgttttatcacagcattagaaaagtaactaatacagggagggctcttagaaatcctttgttgttattgttgttgctgttgaggatcagaattagtgatgtaaaatttctgttaatcaaatgtgtggtatagagaactatgaatactatctatactagtgtgactactcgggtagtagagatagaggtggagaggctggagagaaggctcagtggctagcagtgcttccttttcttccaaaagacctgactttagtctacttagatcaggtggttgacaactgcctgtacctttagctccaggagatcctttaatataaaagacatccaggagtgtaaaactgagtaaaaactgaggggaagccattaaatcttcttggcttatggcacatttaaagaaaaaactaggttattatccatacttactgacagttttagaaaacactgaggccctgaggagaaaagattcctctgggggtgggcagttcactttattttgggggtttgttccgccccactgtcggcttcatcctccagcagatggcagcaccaatgaagttatcagcctaagacactcctttctcatggaaggggattttgtttgtttgcttggttaattagatttgtgtttgggtgtgtgtggggggtctctctctctctctctctctctctctctctctctctctctctctctctgtgtgtgtgtgtgtgtgtctgtgtctgtgtgtctgtgtgtgtgtctgtgtgtagaggattgcccgttgagatcataggaagaaggcattagagcccctggagctggagtttcaagcagttgtgaatgcctgatgtgggttctgggaactgaacctgggtccactggaagagcagcaagtgctctcaactgttgagccacttctccaaccccttctccagatactttaaaaagcagagagacatcccgttgtcagctgttttaccatcaaaatccattagttttgcatagaggatgatggtcagagtgcttcctctcaacacttcctggtctttgtgattaaagcgaggacatctcacactttgaattttatcaaatataactttactattccaagtgatggcatctctgtgcctcttcagttccttctgacacctgctgcatgggcatatttgacgtatggtctggtgtttcataccttgagctaattaaagaatagggaaggagcaggaaaacttcattctctggggaaagtccccaggaagggcaatttggctgcctgtgaaagagctttgaccattcaagctcttccttcaattgaatgttcctttgtctgggaatcgctctacaagaaagaaactctcaagttaggtgtggtacactgtaatacctccccattagacaaggctgatgtgagggctgcagtcagtgcacagactccagctgctccccagccagcctgtgtagtaccgcaagaaacctctcttggagagacatgcatggtcccctggagaagggaaaagggacaagatctcctgagcaaattggaagcatggggagaaggaagagggaactaggagaatgagaaggggaaatgaggaggggtgtggaggacatgatgggacagggaggttgagttgggggaagaacagaagagagcaagataagatgctataatagagggagacattataggtttaaagagaaatcaggcactaggaaaatgtctggagagctacaaagatgacaccaactaacaatctaagcaacagtggagaggcttccttaaatgccctcccctgataatgagattgatgactaccttatatgccatcctatagccttcatccagcagctggtggaagtagaagcagacacccacagctaaaccttgaactgaactggaatccagttgcagagaaggactgatgagcaaaggagtccagaccacgctggtgaaacccacagaaacagctgacctgaacaagggggagctcttggtccccagaatgatagctgggaagccatcatgggactgatccagaccccctgaatgtgggtgtcagtgagcccttggaaatctatgtggctccttgcagtggatcagtacttatccctagcataggaatggactttgggagctcatcccacatggagggatactccctaagcctagacacaaggcggtgggcctaggccctatgccaaaggatatgacagactctgaagacccccatggaaggcctcactctccctggaaagcaggataggtaaggtgttagttgggggagtgggcaggggaggaggggagggaggggaaactaggattgacgtgtaaaataatctttctaattcaagtaaaaaattaaaaaaccctctcttggagagcctttcatgaaaactcaaaggataaactttgtggtgtctcatgattgtaatcccagcacttgggatgctgagacttgtagcagcccaatggataaggcacatcagaacacaggaacagggcaacaaagcattcttgaataaattgagactctcaggatgctaggactggagactaggcacagcatgggtggtacctgtttgaacatctcgggtacagaaaactctgtcttcaaaggaaaactaatcatggtaagtagaaacaagtctccatgacaacctactgtcctggtagaatttttggagcttgtggtggtttgaaggagaaatgtctccttcagctcaagtatttgcatacttggctgcctgtttttttgtgcttctggagaaggttaaggaatgtttaggaggtggagctttgcacgagaaagtatgtcactagagtgagctttgtgggtatagcctggctctatttcctcttctctttgcttcaggtttgaagataaaatgtgatcatccagcttcctttttcaaccatttgcttccatgccatcctgccatgatggcctttaaccctctggaataataagccaaaataatcccgctcttccttaggttacctttgggcaaggtgtttttcacaccacagaaatgtaatacagagacatagtgaaaatatttacctctttattttcatctgacagggtttcaggtaattgaagattatctaatcaccatgtattataattagtacactgatagtaattactatttaaccatttcctattactcgtgaaatactgccacatatttatggtggaacacaaattaatctttataatcatgagatgacagaggccctatttttctcattttagagttgacagcattgagacaggaaaataagaaacctgctagatttcattccatccccagaacccatgtaaaaacactaggcatgatgatgagcatttcaaatcccagtacaggggaggcagaaataggctgattcttgggtgctgtggcaagcaggtctagcctactggagagtactattaactattgtagaggtcagtaacatagaaataaaagatcgatagtcaagataataattacataatgtagggcaatcttgaaattagaaactgatgcaaaatactgaagaataaataaagtaaattatatttaaagttgaatatatattgaagatatatatgaaaagaattttcatgagagtaaaagtaaccatcaatttcagattgtttgaaagatatttaaaaccaggaaagtaaaaggagtatttatttgtgacaataattgtaattaggcaaaaaaaagtttgaggcgctgtgggtaagataccaaacactttaaattatgagaataagagcaatgatgcccactaaatagacaatttaactgcagcaccaccaccacacaatgaaggtgttttttcatgatcagccagtgaatgacaggagtgggattctgaactacagggcaaaattccaaagtctacattcaaaagcagatgaggatctgaactaaactataaagaagtattatgtcaggaatccccagtaacaatctcaggtttgagagttccctgtgagaattcacagagctcagaacagacgtcttaaccatggtgattacagtgcaaggacacagggaattaaaatcaacaaaagaacaaaggtacacagacaagagccagttctgttctcccagggatgtcacacagccagtgcttcattatcctactgtgagtcctggacaacacataggaactgtatttgggcagagaatctcactggaaactagaccaagagtttctattggagtcactcacagagacttaggaggaacatactgctaaaagttcctcagtcaccagtttcagctccaccctatgttcaagtcttaggtgatggaaatcacatctcaaccagaaatcatattgttggcacaaactctctggtatggacaaacttctcagtaaataaatacattcttctcagtcaggatattccaagaattcagcagagaccttggcagagccctgagaacactcttgcttcactctttgttctggttgtatttccttctgcaagatttactgaggattagagctccaagagctgcaacctgtcctggtaacatctatagacaaagttctcacacttcatgtattgaaactgcaagagcaaccacgggatgacaatctgtggtgactctgaaagagatgggcaactggagggtcaggcatgaagggagtgttctagcacttagaaggagacagactaaggaaaccattgagacctacatcctcaattgggcaaaactccacagtgctgcagtccagtcaataggtgccaacaacagtcggcaggtgcgagtgcaaagggctgaatcatgcctgggtaaaggatatagctgagttcttgctttatccttgaccttattcctaatcagtttattcatgagacattcaaggcagagtgacattttgttatcacacagagcaagagacaagaaaagaaggtggcttacctgatcactgtttaaagtctgacactgaatttttaaaaacaaactagaacctttctaaaatatgtgaatgaaatgtgtataaagactttggagtcatcaagattcggtggccaaagagaatgatggaagctgtgggggtttgaatgagaatgtcctcaacaggctcgtatgcttgaagggttagtctccagttagttgaacagtgggaagtgttaggaaggggtggccttgttggggtagatatgaccttggagaaggtatgcactgaagctgggctgtgacatttcaaaccccatgacaggcccagtctctctctgcttactgtctgcaggtcaggatgtaagatctcagccacattcctgcctgcctatcaccatgtactaaacctctaaaactgtaacaagtcacaattacatatcttcttttattagagtttccttggtcatgctatctcatcacagcaatagaacagtaactaggacagaagctttggaaaaagattaactaaaaaaagaaacagtgcactgtggtgaagcaacaccatgaccaaggcaattaataaaaggaagcatttaactggtgggggttgcttacaagtatcagagggtatgagtccatgagcattgtggcagtttgaatgtaattggcccccataagctcacagagaatggcactattaggaggtgtggccttgttggaagaagtgtgtcactgtgggggcggcatttaaagtttcctatgctcaagctatgcctagttcagaccacttcctgctgcctgcaggtcaagatgtaggacactgggctccttctccaggaccatgtctgcctgcataccaccatgttacaccatgatgacaatgaactcaaagttctgaaaatgtaagccatcctaattaaatgttttcctttacaagagttgccatgaccatggtttccctagaaacaccgaactaagacaaacatcatggtaggaagcatggtgatgcacaggcaggtaaggtatctcatatctgagatctcatatcttatccacaagcaataggtggcagaaaaagagttagagcaagagagcaagcaaatgggaggggggagagagggagacagagagatacagggagagaaagagagagagagagagagagagagagacagagacagagacagagacagagacagagagacagagagacagagagacagagagacagagggagactatgcatgcgtgtttcactgagtctaactagtactgccttcagatgcacagagtgtggagccatcctttgggatcatggacaaccttgcagtggccaccctccaaggaaaactgactcttccctccccaagcagccagtcaattgccaataaatccttagctaggatggagcttcatgaacccctgccatgtcagtgctgggatttcaactgctggtcttgggcacgtctttttgcaggtaatcacagttgttgtgagttcatgtgtgcagcagacacgtcacatcctctaatacttacattctctctgtttctcaacattttagttcaataaaatctttctcataatatatatggcataagaattttacattttttatgtaatagctgaatattagctgtgcaaaattatgtatgtgaaaagtaaaatggagctaaaagacccccccttctttattttttgagacagggttttcctgtgtagcgttgtaaaccaggttggcctaagctcgcagatatccacctgcctctgccttctgagtgctatgattaaagacatgcaccaccaccacctgggtaagagcccttattttactttattttgatccattcatttcctagtgtgtttggtaattatctctattcagttcttactgagaataaggaagtttggtgggcacaagtggggaacagtgatgctgaattacaattttaggagtttctagttagaatttttgcttgttattttctactccaaaaacaatgatttatgatcaaaattatcatttgcatcccttgtgtgtttgcagtccttgctagcgatccctgaaacaaggaaggaaagatagatttatttcttacagacttcactttaagacccttgtttggggaggtagtcccctcttcaaggccattttctcattttcaagtgaaggagccaccaatgtcttgaggtcatagtttcccaaaggttgagttataatagaagataggcaatgtttatactaaagtcacttggaacttttttcttttcttttttatttagaaacaaccattttacatatcaatcccacccctctccctcccatcctccaatgccccctaacaaacctcccaatccacccctcatccactaccaagggagggtgaggccatccgtggggtatcatcaaagtctgtcatcatttaggggagggcctaggccctcctccgtgtatctgggtttgaaatagtatccctccatagggaatgggctcccaacgtccatttgtacactagggataaatattggttccagggttagaggtcccatagcctgccaagtcctaactggcacccacatttggttcagtccaatgctggttccccagctttatgactggggtccatgtgctctcactaggtcagatcagctggttctgtaagtttctctggcaaggtcttgattgctttgctcattcttcctccctctctacaactggattccaggagtatgactcagtgcttagctgtgggtgcctgtttctgcttccatcagctactgaatgaaggctgttcagggggcctggtttggtcccatgttggttccccagctgtcagactgcagtccaggagttcctactttcacaggtcagctgtttctgcaggttttcccagtgtggttttgactcctttgttggtcactcctcctcctctgaaactggattccaggagttgagctgagtgcttagctgtggatctctgcttctgcttccatcagctactggatgaaggctctaggatggcatttaagatattcatcattctcattataggggaagagcatttaaggtagcctctccactattgcttagattcctagttggggtcatccttgtggatctctgtacatttccctagtgccagatttctctttaaacctgtagtggctccctctattgatgtgtctcatttcttgctctcctctattcctctccccactcaatccctgatccctcatgtacttttccctgcctcctcttactccttcctccctcccccctccccacatgctcccaatttgttaaggggtttttgtcttttttgtttcactgggggatcatgcatgtctttcttatggtcctccttgtttccttctctggaggtgtggactgtaggctggtaatcctttactctatgcctattacccatatgtgagttagtacataccatgtctgtttttctgtgactgggttacctcactcaggatggtttcttctagttctatccatttgcctgaaaatttcaagattccattgttttttcatctgattaatactccattgtgtaaatgtaccacattttttctatccattcttcagttgaggggcaactaggttgcttccaagttctggatattactacaaataatgctcctatgaacatagttgaacagatgtccctattgtatgaatgtgcatcttttgggtatatgcctaagagtagaattgctggatcttgaggtagactggttttcattttccggagaaaacgccatactgatttccaaagtggctgtataagtttgccctcccaccagcaatggagaagcactcccctttatcatcctctccagcatgaactgtctttggtgttattggttttagccattctaactggtgtaagatgatatctcagagttgttttgatttacatttccctaatgcctaaggatattgagcactttcttaagtgtctttcagccattttgattcctctattgagaattttctgtttagttctgtactccactttttaatcaaattatttggtgttttggtaactagcttcttgagttctttgcaaattttggagatcagccctctgtcaaatgtggggttggtaaagatctcttcccattctgtgggctgccattttgtcttgttgactgtgtcttctgccttacggaagcttctcagtttcagtaggtcccatttattaattgttaatctcagtgtttgtgctatcagcattatgttcaagaagtggtctcttatgccagttcattctagggtacctcccactttctcttctaagaggttcagtatggctggatttatgttgagggccttgatccatttggacttaagttttttgcatggctatagatatctatcttcaatcttctacatgtccacatccagttatgccagcatcatattttgaagatgctttctttttttccattatatagttttagcttctttgtaaaacatcaggtgttcatattaacaaaatcagaaatgaaggggggacctaacaacagacattggggaaatccagagaatcatcaggttgtacttcgaaaacgtgtattccacaaggttggaaaatttaaaggaaatggacaatattctggacagatatcacttaccaaaattgaatcaagaacagataagcaacttaaacagacctataaccttaaaggaaatagaagcagtcatgaaaagtctcccaaccaaaaaaagcctagggcaagatggtttcagtgcagaattctaccagaaattcaaagaagagctaatatcaatactcctcaaatttttccatacaatagaagcagaaggatcaataccaaactctttttatgaggctacaattaccttggtagccaaaccacacaaagaaacaactaagatagagaactacagatcaaactccctcatgaacattgatgcaaaaatagtcaataaaatactgacgaatagaatccaggaacacatcagagaaatcatccaccatgatcaagtaggcatcctcccagggatgcagggatggttcaacatatgaaaatacatcaatgtaatccaccatataaacaaagtgagaaagaaaactcacatgatcatctcatttgatgctgaaaaagcctttgacaaaatccaacatcctttcatgataaaggtcatggagagatcaaggatagcaggaacatacctgaacataataaaggcaatatacaacaaagtcactgggaatttatcccaggaaacatccattcctgctataggacttggctacgactgctgccctctgctggcttggtacagcttgcaaggatctgcccatccttttggacttttggacttttggacttttgtaatctggccaggtgaaaaaattttcactttgtgttgaacttaggtaaatggccattctcctctctacaacttcatattctttagtttattcattttcaaactgttttagacaggcatggtagaccagtgctttaatcccagcacttgagaggcagagacagccgcatctctcagagctcaaggtcaacataatgaaaccccgtctcacaaaaaagcaacaacaacaacaaaaaaccacctttattttaacataaaaaacatagccacagaaagtgcttttgaatttttgaattttcaaaactcaagaatgcaagatgtaggactctcagctacttttccagcatggtgtcatcctgtgtgccatgtatcatcatcatatcccgtgatgataatggactgaccctctgactgtaagcaagccacaattaaacattttccttcataagaaaaaaagaatgatattcaaataagtcactgaattacctacccctaattcattcatagaagatttctcagcttttaatttatattatattttgctagagttggcattgaagacccaatgcatgctaggcaagtgacccgaatccccagtccaaatttctcatttttaaatgcacatctctataagaatttataatacacttcacagaaagttttctaccttatagccagatggaactgtgtcgtgtcgcctacactgtaaaaagaagattggacatgtatgttattcaactcgcaaattagctacttctgaaagctaaattctctgactttaacatggagaaagaaaattctttagtgtctctgccatcctattgccaagacagtgtgtgttcttgacttcaactgacttgatgtagaaacatattttacaatttcatttgaattgtactgcaagcctatgggacaaaaacccaatattctcaggaagagcaactgtaatgaaagaataccaaaatttgcatctcccaaaactgagtcaaaggcttagtgcatgtgtgatctcggagggcacgttcctgcatctgagctccagtttctatcatgtagaataatgttcactttgctggttaccacataagtgtttgaggaagattaagcattttaaagtttttttttcttttagtagtgtaagtctttctaccagaaagcacctttattcttctttcattttgtcctccctgtctgttcctcaggattccacagcataaatttaaaataaacagcatatatagatgaataatagataggtggatggatggatacataacatataaatatgtagctgaaaataccacacattcctacttctgtctttgcttgtttccatctgttcttctttgtggtgtctggaacgttctcatatactaaacatgtgtgaattctaatactctttagtcagacacttcaatggctctgcaggtctgatgccatcactggtttctggttagaactttcctatcaattttccttatttcaaagaaaaactggttcagcagcagcattgcctggagattcaatctagtacaatgcttgaagacaatgactaactccaacttattaaaacctacccagaataagctcccccaacactcactggcagagaatgactgaaggaatgaatgaaaactttgaggtaaaatagcaactgtctctgcagaaggcaactcctcctttagcgatgaaatttactctttgatgatgcaaactggagatattttagtggttacaggaatttacctcaggatgaaaaatggtgtttaagtatttgctttctttagataagaatggaactagtgtgttcttgtggttctgtctcatttcatcttaataaaagaagaaatgaaacttcttttttttttggtttttacaacccgagcctgtgctattatttttataattatttttatttaaattagaaacaagcatgcttcacatgtcaatcccagctccttctccctcccctccttccccatccccaccagttccccaccccatccccactctgtgccccagggagggtgaggccctccatggggaatcctcaaagtctgtcatatcatccagggcagggcctaggccctccccccatttgtccatgttgagagagcagaaaggaaacttcttaattaaacttatgagctgttcccctttgatgccatttagatagctctgttaatagttctgattctttgtggatccctatgtaaattccactcacaaggaccctttaatacatatttatgaagggcaatgtttccctctcaccactggtgaagtcctaacaaagtccttgaattagctctatggtgtgctgtggctatttctggaccttcttctatatcagcttgcttccaaacacatgatgtgtgctctatgtcatgacagtgtgtgctctgtaaggctgtcaagggatgcttttgagataaagttccatggaacctttctctcctgatctgataacatggtgagtttctcaaaacaaggaaccaggaggttaagtgctttcattctaatttttgctcaagtctcaagcagacaataggccagatgtaaagggcttgatttaactttttgtatgtgtgtgtgagtgtgtgtgagtgtgtgtgttgtgttgtgttgtgttgtgttatgttgtgtatgtatatgtgtttatgagtatctgtataaacactgcttgagtgtgatcagaagacagccttggatgttggttcttgctttttatcttgtttgaaatggactcttgttcactgctgtatatgccagggatgttcctgtctccattctatcttgccataggaaggcagaaatcagaggtggctgctatagtatttggctttaaatgggtgctgtggactcaaactcaggttctcatactcaactggcaagatctttgcctaatgagatatctccctttcctgtcttattcttttttttaaaggaaatgttaatgtgtttaggaagaatcataggtttctctgtcattttcatccaagtatatcattgtagtttgctcctattcacacctccatatcctctattgttctctatccttcttctggttggttctctttcctctcagtgagcccccttcttcttttctgccacacgcacacacatgcatgcagcattcacatgtatacacacatgtatatgcgcgtacaaatgcatatactgacactgaacttcatcttgcagaagaatctgcaactctggtttattaacacttctttaagtaactggcacaagtaagatgctctgcacgaccccagagcttgccagggtatctcacaagcagactgcagctagtaggtggattctgaagttcatgctgattagcttgcagttgtttaaccctaacccatctccacccttaaaagtatcagctttgggtttggaggcaggattagttctgcctctagcttggggaaagacctgtggcaacagatgatatttatggaggaccttgatgagggccaggtgtaactttaaatgtgtgataacactatgtaatacttgtaacagaaaaatactgttatttgtctgtccatgaaaaggaaaaaggcaggcggtgagacgctcgatgaatgaagcatttgctgttaagtgtgaactcaatatccagaacctacctaaagccagatgtggtaggacatggttctgtaatccctgtactactacaagaagataagaagtgaaggcagaagagtccacagaaacttgtgaggcagctagccgatgtactcaatggaaagcgaagagaacctgcctgaaacaagaacttctgcaaagaccaatacctggagggcatcctccgatctccattgtggcatatgtgcccctgccccgccacatgcacacagaaagataaatttaaatgagaaaggaaagaaacaaattgacaactgagactttagtaaattcaaaagcacttatgcaccaaaggaaataatgtcaagtgaagagtgagctacaggctgtgctagctgtctacctgaaaggagattagcacttaaaatacatgaaaaacttagtaaaatcacaatagatcaatggcacaattaacacatggtctaatgaaatgaatatggatagtacacttgtgaaaaaatgaccaaactcctaatcatcagagtatcacaaattaaaactatctgaaaattctttcccattgctttcagaatgacaaccatcaagaaaacaaattacaaattcgggtgcatatattgctggcttcaatataaactagtccagccaccatgaaggctccccaaaaaaccaaaaaagaactgccttataaccaggctttaccactcctatatagttacccaaagaagttcaagttaacacaggacagaaacaactgccatccaatgtttactgtagttgctgtttgcagacagttatggaataaacgtaggtgcttgttacagtggaagaaaggttaaagaaatgtggtttaaatacacaatggacttccataaagccataaaggtgaagttagtgatgcaacttgaaataatcatagtaaaccaatcaagacaaataccacatatttcttctcatttctggacacacacacacacacacacacacacacacacacacacacacacacacgtgtaacacagggtttgctaacagaaggggtgaaggatgggaaaggtatgtgaggagagtagggtgtggaatacactcaaaagtacattatatgtttgtgtgaaaatgccctcatagcccaggaccatataccatgaatacacaactttgtgatctgaatgaaaatgttctctagaggctcatatattgaatacttggctatcagttattggaactgtttcagaaagattagaaggtgtggcctttttggaggaggtgtgtcaaagggcgcaggcttggttgtttcaggagacacctgccattcccagtgtgtttcttcctctatgcctcctatttgtagaaaatgatatgagctttctgctgttgttctagctattctgcttctatgcctttgctttgccatcatgaactctaaccctctaaaactctaagccaattataagttgccttggttatggtgcaagaaatatcacagcaatagaaaagtaagtaagacaaagtcaaatgaaaataaaaattatgtattttgaaaattacaagttcaagtcttgtctgttttttatacatctaatatcaagagcatgataactaacaggtgatggtaatatctatctcaaatatgctttctttgtctcttatgaaacatagaatcagtacagctctcagatcttatcagagaagtttctttgtgcattgaacaatggttaatgcagcagttcataacaattcaaactgcagagaataaagttactgcctagagacagatgggacatctatagtatgcccccaacacaaagacccagaagcaatcacagaatgtagggaaaagtagttagaacaggaaatactggagtaaaacagcatcttcaggacatgacaaataaactgctctcttgaactcacagcagccatgacaagacctttgtaagatcaaaccagtcagcattgtagcatggggacaggaaaggatttgcaagcctccattttaaactgaggatccattaacagttaggggagggacatctagttttgaccatactccagtggatggccccacacctatgaggatatggtcatcacaaatttgacttggtaacttatttttaaaagggtaaaagaagatatgaagttgaggagagtgagacagaaaagagaagatccagaagctgatacagggtaaagtagtggtgaatatgattaaaatacccttatatgaaatactcaaagaattaataaaaatatattaaaatagaactaatatatatttaaaggatcaatatatatggtaaaatttttctaataaaggaagttcagcatgtttgatgttctatatgtctataacttgtggtgtaatttgtactattagaagttaattctctcagatttaactagtaatgtacaatgaggtatctgatttagacttcagacttcaacacacattcacccctgatgccctgtatgttgctataaacatttctcagttctcaaaaagggcagaagagaaagtgggagatacccttgaacgaattggcacaggagaccacttcttgaacattacaccagtagcacagacattgagatctgcaattagtaaatgggatctcctgaaactgagaagcttctgcaaggaaaaggacacagtcagcaagacaaaatgacagcccacagaatgggaaaagatcttcaccaactccacatctgacagagggatgatttccaaaatatacaatgaactcaagaagctagccaccaaaacatcaaacaatgaaattaaaaagtggggtgcagaactagagagttctcaacagaggaatcggaaatggctgaaagacacttaagaaagtgctcaaaatccttgcccatcagagaaatgcaactcaaaacaactctgagataccacctcacacctgtcagaatggctaaagtcaaaatcacaaatgacaatcgatgttggagagaatgtggagaaaaaggaacactcctccattgctggtgggagtgcaaacttgtaagaccactttggaaatcagtatggcagtttctcagaaaaatgggaatcagtatacctcaagatccagcaattcttctcttgggtatatacccaaataatgcacgctcatacaagaaggacatatgttcaaccatgttcatagcagcattgtttgtaatagccagaacctggaagcaacctagatgcccctcaactaaagaatggatagagaaaatgtggtacattatacaatggagtactactcagcagaaaaaagcaatggaatcttgaaattcgcaggcaaatggatgggactagaagaaaccatcctgagtgaggtaacccagtcacaaaaagacaaacatggtatgtactcactgatatatgaattttagatatagagcaaaggattaccagcctacaatcctcttcaccaatgaaaataggaaacaaggactccaaggaaaaaatgcatggacccaacaaattggaaggggcaggaactcctgagctaattgggagcatgagggtaggggagagggagctgtcagaatgagaggaggagaagaggagaggagaggaggaaatggaggagcagaaatattgagttgggggaagaatagaggagagcaggaggagagataccatattagagtgagccattataggtccaaggagagatctggtactagggagatttccagagacctactggatgacacgaactgacaatctaggcaattgtggagaggagaacctaaattcccttcccctataatgagactgatgactaccttttatgccatcctagagccctcatccagtggctgatggaagcagaggcagacacccacagatatacactgaactgaactttggaacttagttgctgagagggaggaatgaagatcaaatgggccgataccaggctggtgaaacccatgaaacagctggcctgtacaaggggcagcacatggaccccagactgctgtttgggaggccagtacaggactgatccagacccctgaacatggatgtcatgaggaggcctctgcactccaggggccccctggtagtggattagtatttttccctggtgtaagaagggattttgagagcccatcccacatgaagggatgcactctcggcctggacacatgggggagggcctaggtacggcccaggatgatgtggtggaatttggggagcccctgtcaggggcctcaggggccctaccctgcctggggagtggagggtggatggggtgggatgtaggttgagggcatgggggaaggggtaggggaaaagggagggagaggaagaagggattgacttgtgaaacaagcttgttcctaatttgaactaatataaaaaaagaatagtaaaaaagaaggtgattctctcagatttaactagtaatgtacaatgaggtaactgatttagacttttaactttatgttatttctagatatttataaaagtttggaagagtctaagatgaggcatcattgtagactcatgggtatttcccttgcatcaggcttctacccaaccctgtagagccctattttctagtcatctctctcagtacttgcccattctgccttcccccacctgatcccttacgttcccatccccacctccccctagcttacccaagagatctcctctattttccttcctcaggtaaatctatgtgtgtacccttgagccctcatacttagcctatttggggctgtggattgtaggttggttatcctttattttagagctaatatccacttttgagtgagtacatatgatgtttgtctttctgggtctgggttccctcacgcaggatgacttttttctagttccatccatttgccttcaaatttcctcatgttaatgtttttgacagctgagaaaatgtaccatgttttctttatccattctttggttatgaggcatctagtatgtttcctggttctactagctattacaaacaaagctgctaggcaagatggaagtagaagcaggcagccacagctaaacactgaactgaactggaatccagttgcagagaaggcggagtgatgagcaaaggggtcaagacaaggctggtgaaacccacaggaacagctgacctgaacaagggggagcttttggcccccaaactgatcactgggaaatcagcatggaactgatccagagcccataaatgtggatgtcattgtggaggcctcggaaatctatggggcctctcgtagtagatcagtacttatccctagcatagtaattgactttgggagcctagatacacaaggggagggcctaagccctatcccaaaggatatgacaaactctgaagactccccatggaagacctcactctccctggggagccgaattggtatgggacaggtagggtgttactgggggacaggggaggaggggagagaaagggaactgtgattcacttgtaaaacaatcttgtttctaatataaataacaaaatggagaaaagaaaagaaaaataaatcactttaagaaaaaaaacaaataaagctgctataaaaatagttgagcaaatgcccttgttatatgattgagcatcctttgggtacatgcccaagagtggtatcattgggtcttgaggtagatctttccccaatttcctaagcaaccactgtattgatttctaaagactcctggtagcagtgaatgcatagcgtgaactggccatcctctgtgatcggattggtgactactccagttatcactggaaagtcttcatccagagactgatggaggcagattcagagacccacagcccaacattgggcagaccttgggaagtatgcctgaggagaggggagggattgcaagagccaagggggagggggatcaggaaaactcacagaaatggcttgtctgactaatgggacctcacatagtcagaaccaacagccagggagtctgcacaagactgacctaagctctctgcatatacgagacagttgtgtaacttgatctatttgtgggactcctggtaatgagagcaggatctgtcccgtgtgctttgactggctcttgggaacccattcctcattttgtatggccttgcccagcataaatacaagggtaggtggttggtcttatggctgcttgataggctttgcttgtgctttgctgacacacagaagagggctgcccctttctgagctaatgaggaggagtggattgggggttcagatggaaagaaggtgagggagtgggtgacgctttctctagatctacatttgcaatttagaatttgctattttggatgattctattactaagagagactttttaaaattaaagtgaaaataaagttcacaaatatagtttggtgtatatttaagtatttaagaaactaagattgcaaattgattttacatctgtggtcaggatgtaaaataaattaattaaaatttaaaaagtttggaagaccttctctgtctttagattctctgaattgattatgtttacatttaaattttatttctttaagtttatagtgtgtgtgtgtgtgtgtgtgtgtgtgtgtgtgtgtgtgtgcaatacacatgcaggtatctgcacagcctagaagagggcatcagactacatgtagttgaagtcatagatgtttgtgagccatcatttggattttaggtatgaaatctgggtcgagttgggagaagaacagataaggtgagcaaggaaagagctaccttaatagagggagcctttgtgggcttaactagaaacctggcactaaggaaatctccagaaatccacaaggatgaccccaaataagaatctaagcaatagtggagaggctactatgctcttcccctataatgagactgatgactaccttaaatgccaccatggagccttcatctagtagctgatggaagcagaagcagagatccacagctaagcactgaactgaactcccggaatccagttgtagagagggaggagtgatgagcaaagggatcaagatcatggtgagaaaaacccacagaaacagctgacctgagcaagtgtgagctcaaggccccaacctgacagctgaggaaccaccataagactgaaccaggcccctgaatgtgggtgtcagttgtagggcttgggtagtctatggggccactggcagtggaaccagtattcatccctagtgcatgaatgggcttttggagccctttctctgtggagggatactctctcagcctagacacacaggggagggcctaggtcctgccccaaatgatgtgacagactttggtgatcccctatgggagtggatgtggggtgggatgggggtatgggaggggaaatggaaggaagggagggaaagggaactgggattggtatgtaaaataagactggttttaatttaaataaaaaaataatttaaaaagaataataatctatattgaatcaaaagaaaaagagagtaaatattctatcatttccaggaaacttgaggtggggaaaacaactctaacaactgcttggagacacatgactagcaactgaaggctttgagggctgggttggagaacctgagagagggttgtctgctgtgggagctttagatggttgttgctggcaacatgttcaggaaattttgtttgaataagccaataatattgcaaatacaacatttatcctctcaactgaagagatggtctttctaaaacctaagatctctctctcctcccctttcctcagactccagtcttcttctcttcccattcctcacccaccttctccttcttcctctctcctacataatagacatccattttccggatttgagtgttgttgttgcctcctctccctacagtgcatttaagctttcacaaataaagaataggttcattaaatataaatattagaatgaaggaacaaaactcagccaacaatgctaatttctctttcctggtgtgggaactaatatttaaaagaatcaatgaaaaatacacaaaactattcctttttaaaaatcacatttgtttatttgtgagtgtacatgtcacagcatagttatggtggttgaaggacaacttgatggaattggtgctctccttccacaatgtgggtcctaggaacccaactcaggttaccaggcttggttgctagggcctgcacttggtgatccctagtttctttcctaataattttacaattacaccacacacattgtatatctatgtgtgaatgtgtagtagtttttacataacaatgagggagtgacctggaggagaatgattttgaataaaccattttagaggacaagctacttctccagccaataaaagaaaaaaaaaaaaactacagaaagccagaagaggtaggtaggcagaagaggtaggtaggtgtgtgtgtgtgtgtgtgtgtgtgtgtgtgtgtagcagggcagggcacaaagcaagcctactggctaatgggcatggatcaaaagccagcaaagcacaatggaaaagaatataattcagctaaatgtgttagagagatgttctcaacctgtggattgtgactcattttggagttgaaagaccctttcacaaaagccacttaagaccatcagaaaactcagaaatatacattatgattcataacagtagaaaaattacagttttgaagtagcaacaaaataattttactgttgtgggtctccactacatgaggaagtgtattaaagggtcacagaattagaaaggttaagggtcactgtgttagagggatcctgagaaggaggtgtcttaacagaattggaacaggagaaggtgaccttttgcgtgaagaggaaatggagttacatacatgagcaatgcggaggacagagaaactgtgtagagttcatgatgtacccctgcattctagaaacacccactcacctaatgacaattggtacttctctctgttcactcagtcatgtctccatctacaaacatggtcccctcatcactctttcccagccttatagaggcacatagttccactggttccagttacagggcatgcggacatgagccagcatggcggctactctctgcatggtcaagttagatttatccacatgtacatacagggggatgtcaagatttcctagagtgtgaatctggtggtgagaaatatggtaaatgagaccctggcgccggtactgaggcaaggtgcctcccattctcagttctccagtgtggtccatcaggcaccaggacacggggatcccctcaggccccacaatacagaagctggggaaggtgtggatacagcgctcaatgaacttctgacttctctcgttgccaccaaaatgccagacgctgttcaccaatgcagcgtgggtgacatccagggaggtgaatttgaacacctctttgttactgtggagaaaaacaggaaagttcagtccttaatcacataggctatgaacaattttatttcttacccctacattgccctaagaggcaaaaagtagaatatctaagattgtattctctgtagctagactacctgtgttcctatcaacaaggtgtgcatgagtctgagtaattactctcaccttttgtatttccccatctagtgagcagggctaaaaagcaacttgccctgtagtgtaacaaggcagtgtgatgggggctcagattcagtgcctaacaggaaaaaacgctccaggtaacatttccagtttatttgcctgtgaccattatctttgcagttagagagctcaaatatgatctttcagtcagttcaaatattatcagtcttattttatgagaaagtaaacagttttgccgacattagcaagctttctaaaacaaatgtacaagcagaaaagccacagttcagaatcgtagaatttcgtatcttgtgggggttaggcactgtggtgcacaaaagataaagtcaaatgcaaacaagggcagtgatgtggaaggaagttggaccgtgtcacagggtcctgatttctgaagacacatgcagtggtgtgaggaggcttcaatggtcattttggaaaggcctatggaggaggagctaagcactctacttcaactccagttacaggttctgtcatccatgtgttgagcaaactattctggattctgatttctgtcaagagagtaggctgtcctctagctcatagcaggacaaacttctgaggagcttctagataagagtgctctccaggttgtcgtgtagtatacatagagaacagaattcttccaggtagaatacttcacagagggttgtaagattgaacatcctcaaatcacatagtgactgccagcctttggttctactcagcattacattaaacaaaaatgggaacaatgtgagacttattaaaatgcttttattagaatatttttattattcccgttgttttatggggaggattcacagaatacgaatttgtttaaaacccactgtatgacagctactgacaatccgagctcatgcagggttttccttatttccttgagtcaaacatcaagtctgtatcataaattacttagtttcaaatactcaggagtactctgagtaaaataaacctgagtgctgtgcaggggtgacttttattgaggtgttttccctaggactctgatgaggcaacttgtgagcagatctggataacaaggaaagttgtcagtgtaaagactggtctgcttaagagagagatgctttgacagagaggagataatataaaggcctgatctcatgaaggtcaaatagaaatggtagtaaagccatggcatagcatcattgtacattaacctctgcatttagcttcaacacaagaaacatcttgaaataattcacatagatgcttcatgtcaccaaagaaataatagattgttaattgacattctgagagacagaggagagagcaagagagagctatcaaaacagagaatatgaatgaggttctctttgctttaagccctaccaaaataattaacttgaagtaacctgaagtgaaccagtctgtcaaattccaatgttatcttcatttcttattttacataggaaataacattgaaaattttttttgtgttattttagcttttctcagcctatagaatcaactttgttgctctttagttacctccattagagaactttgtttgaaagaatgactcaacctctgattttaggctcatgtctacaagacagttcatgtttctaatatgaacttgtaatgctttttaacaaagactagaagtttaggagggaataaacaagataaaaaataaggcatgagagtagatgaaaattcctcctagaggattgtgaagttcagaaatatttaaatgtacttcaggaagtactgaaattttgggagtgggagagagacatgatccttacttaacgtttattgtggttagacagctactctgcagaatatttgttgtggtacagttaccagagcaaatgctagcagaggcagtgggggcatggcagtttatcagtaacccacattcaactggtataaacaatgaaattttaattgcacttatttatttttgaaatacttttattatttgaattagaaacaagattattttacatgacaatcccagttaccttctccctcctatcctcccccaccaccccctccaactaaaaccctacctatcacatatcctttcttctattcttcccctggctcaaactttctgctccctcatgacctctgcatccttcctcttcttcccttctcattcttgtagctccctccaccccttcccttgctcccaatttgctcagggaatcttgaccctttccctttcttaggggaccatgtatgtctctctgagggtcttccttgtttactagcttatggatcagccgttaaaggctaggctcacaaccaaatttatttatttatttacttatttatttatttatttatttatttactcatttatgtatttggatgttatatggtcttgtgtgaaaataagagaacaagtttttggagttggttctcttcttcatcaggtaggtcgcagggtttaagtcaggtaatcagagttgccagcaagcacctttagctgcggagccaacttgccagccctttatgcagatcatcttgcttagaaaaggaatctttgaatatacaaatttaggacttcaatataaactcatcccaattatttggtgggtcccaaatctgttgataagtgtcctcacaacaaacaaaagaggaaaagacacagatgacaaagaaggtcatgtgaaagtgtttctgtgagtaggtaatgtatcccaaagccaaggtcatcctggaatggcactgggtgttggaagacatcagaaggaattctggactgtggattccaattcaatacagccctgatcaaatcttgatttttacctagactccaagccaatgatagaccacatgtgctttgattttagctctgtgttttaaggtggcatttagtgaccactttggaaatctaacacaggaggtaagtcattagtaagagagtaaaaggtgcagaatctcttctcaaacacttacataggtttgggcttgtcactgctctgtactaagttcttggaatccaccaaagaaggaagcagtttctttgctgtgtcaaataccatatagagaaagcattgtgtatgcttgacgttgcccaaattaatgtctgcaagatgttctatcactttgtccaggcttgactgtgaaccttgatggagaaaatgaggaagcaaatgatataccaatttttatcttagcatttaggaaaagctgtccagtggaatcaaaggaaatatgaacatagaatcatcaagtattgtattgagtcatgacaggattaatatgatagagattatatcccttccatgttttttaaatctaagtttggatagtatcacaaagccagattactttggagtagttatagctaacaaagaagatgagttagaagcatggtaactgacattgaatggacaatttctatgtacttgatccattaaattgttaccattaggttctcagtttctttctatttcactaaaatgacttccttcatcatgacttggatttggtttgctggtaaaccttgtttaggctcatgggaaagagggtgatctagtaaacttgtttcaaagaatgcactgaagttgactttcacttactgttcctgatcctgtgacattcacatgtcacccaatctacttccattcctgtagttcagagttggcacagtgttattctgaaataccagacttgggatcatgatgaacctattcctgctagcccacctgcaaccctccaggtgactgagcccatatgtgtgaaactagttgcgaccagcagagccacctagctgagccaaatttcctacccataaaaaaataattgtcattttgtgtgggatgtaaagtacttgttcaaaaggaacagtgacttccaccttgtgtaacaacagccccccaacacttcccagttctcttactttgaatctgtaaatgctgtttccagttaatgacttctgatgagccaaggaacttctgacagttcacaggatccttggaatatattagataagtgttggtgtagtggtcaaggtcatctgtcatgtcctgttttagaaagaaagaataaacaagagtgtgggtgttgtggtatttgattatattggtatccagttacattgtgagattttacaatattagaagtaatgcttcttgtgcatttatcttgtaattatttacaatgtgaaatcaagggaaaaagccatgacacaattcaatgtaaaagcaccctgaaagacattaccccaactcaagagtaagcacagcattataaaatccatttagaagactcaaaataacaaactaaaagcaaaatatttagctaaaagaatactccttcctctgggctatgaatgccctggtgttaaagtctataatgaaaacagaatcagaatatacacatagggagccaatgataaatctaatgaactagacagtccttcaaaagtcatttattattattaactaaatggcaacctccagaagcaaacaatgagcacacacacacacacacacacacacacacacacacacacacatgtttacagaaatatgacagccattaatttataatctgaatacatttattcctctaattttaatgaaatattaactaatatattgtataatgcataatgatattatagatccaactattgattttcttgctatgccttatacaatatttaagacaacttcaaagttcatgttggcaaaatttttccacttggaatcatgactaaactccaattctctgcctgtttcatcaactacctataggccttcatttttttgtctacctcctttgttgactttgctgtagataactgatataaaggcagaggccccctcaatgggaagccaatattacaatgaaaagttgtgatagagtgagatcaattggattatttcaagttcaatgatttttaagacaagaaatttgttttgccctcagataatagttgacaatggaactaagaactaacttgttacaaatacaaacctagcttaggaaatgtctttttctataaagaattacttattcttattttatgtgcatgaatattttgcttgcatatacgtatgtgtcacacatgtgtgcaatgccttcagacattagaggaagatgtcagatttcatataactggggatactgacagttggtggccaccacatgggtgcctggaactaaatcctggtcctctgcaagaacagcaactgctcttaaccactgagccatctctccagccctcagaaaatgttttaatgtttataacaaaagatcaagctatgctttatgtctccacataatcttaaattgatacgactttccaccacttgcctctaaatccaacaaacaagatataagaaataatgaagtgataaagtatgcttggaattgaaatcagccagtgctgccaagcaaaataaaggcatggatgaggataaaagtgtatgatctgcacctttagttaacattctccttgggttattactatacttttgtgtagttcctttcttgctcactctgtaattttatggacttttatatgttatccttcaggcagtgcattggttgaaactattacacttcatttctatttcttaggaagggagtaggctgtggcatctagcatacagccagacatatgctaggaatgcaacatatgtggagatacaggtatatttactttgtattgcaacttacctcctcctggggtcgaataacaacagtattaaaatcaggccacttgtccaccagagccttgaccttgaatgggtttcccttattcatgtggaagacagtgccataagcctaaatatttcaaaacaataggaatgtcatcacattacaaagagataaagactacaacatatttgactagaacactacgaattattatgtaattacaaaattttgttggaaagatgtaataaatgaatctttaaaatggttctttgtgtctagttgcttattctaacaacaatatcttttaaacattaataaaacaaaatgtaaagaatgatgcaatttatgagtaaactcatgacctcccctgatgtagaatctaatagaattttttcatgaatttctgtcttttcatgcactgaacaaatcttatgaagctgagacattccagaatgttttcccattcattgcaaatgctttctttactattcctgggagcatgtttgtgattgctgctttaagatctacactatgccattcttagatctgcatcatctggctgttgatatgtgtggaccattgtttctcctctaagatttagtcaggcttagtgatacatgtctgatatctcagctaacaggctgaggcagtcaggttgaaaattcaagggctgcctgggattatgcagtgagttccacaccaatttattaaaatttggtttctgcatcatttgtatgttttatgacagacaactttacttcatctcttctgagaaaatgttataggtcaaatcatagttcacagaaaatcccataataagttatgtgatacttaaaaagaaaactggtaattcttgtacattaaatcttattccattgaaataatatatgttacaaaaggaatctgattatacacattttaatttattttatactttaaaaaaccttcccctgatgaagccatgtcagggacacaactaaagcaaattttaaataagtaagaatctatataacttaatatctaacatgatttcaactaaacagtgatttgttatttaagaatcaggaaaagtcttttttccatactgacaattaaaactagggcctttcatgggctagataaagactattattgacctatatctccaactttcaagttcttatttggttctcaccaaatttgtgaagtaccttttgaagtaaacagggacatgggtttaatcagagggagcagcaatttgctttttaaatattgggcaaatatttaaaataagtaaaaagatttatttctactctggtagcataagcatagggtaagagaaatgcatgatgtcagtgcttagtgagtcttgacctccatcctccctcagtcacagcaaggtgtggtcctcagttagacaatgttctactctcacctttaaggactcaggaaggtgcttcctcagggagttctccagaagctgaagcatctgagaaccctgtaagtagagcatctcttctgataccttagatgaaaaagagtaacaacaatagcaagtcaggagtgggaagatactttacacagcatatccagaaagcctctaagaatcaggagtcacaggttgataatcttcaggaatttatttctctcaggtctgggaagtttatgatgaagacactggtatgttttttatcctttgcaactctgctttttatttgttaaataaccctctagctgtgccttcttgggatgaaagagtaggcttgctttctggagcttaacctatgaaagcattcataacatctgaaaaggagacacaatcacctcccatgggacctcagctccttctattatgtatcatattggtgaggcctcaaacataggacctttgtggagacacaaacattcagacaacagcaatgctaagcagtaggatctgactctacacaagcttttcctcatatcttctttttaggtaatatgattttatggtcatattcagccactttgctgctgaaggtatgtatcagctgtagaagttctcttgtagaatttttgggttgcttatgtatacaatcatattatctgtgaataatgatactttgacttcttccgttccaatttgtattccccttaatctccatctgttatctattgctctagctagaaattcaagtattatattgaatgtatatagagagtatggacaacctcatcttgttcctgattttactggaattgctttgagtttctctccatttaatttgacattagctataagcttgttgtaaattgcctttattatgttagggtatatttctcatttccctactctcttcaaaactttcattatgaagtggtgttgaattttttcaaaggctttttttctaggggggcatctaatgaaatgatcatgtgattattttatactgtcattttgtttatattgtggattacattgattagttttcatatgtagaatggaccatgcatctctgggatgaaccttattggacatgatggatgatctttttgttgtgttcttagattttgtttgtatttttaaaagtatttttgcatctatgttcataaaaaattagtctgtaattctctttcttttggatctttgtgtggtttggatattagggtgatggtggcctcataaaatgcacttgccaatgttccttttgtttatattgtgtgaaaataatttgaggagtatgggcattagctcttcttgctatattctgtgctaaaaaccatctcaccctgggcttttcttttctttggttgggagactttaaataacttttatttccttgggagttataggtctatttaaattgtttatctgatctttatttaattttgctaagtggtatctatggagaaaattttacacttcttttagatttttcaattttgtggagtacagtttttaaaagtgatctaattattctctggttttccttggtgtctgttgttatgtctcccattttatttctgattttgttaattctgatattctatgtgtgggtttaggttactttggatcagaattttttgtattgtttatattctcaaagatacaactcatagtttcattgattctttgcattattctctttgtttctcctttatggattgcagccttgattattttctgccatctatttcacttggatttggttatttcttttattctaaaggtttcaggtgtgctgttacatttctagatctctcctattttttaaatgtaggcacttaatgctatgaaatttcctcctttggcaattttcattgtcctccatacatttgggaatgttttgtactcattttcactgagttctagaaagtttttaatttcctcgtttgtgtcttgatgcagttttcctttagtagagagttgtttataagagagtttccacagttttgtaggatttctgttgtttctgttattgatgaaatccatcagacgcaggggttatttcaattttcttgcatcttttgagacttgctttgtgaccgagtatgtggttagttttggagaaggttccctgtggtgttgaaaaggtgtattcttttcatttagtttattacgtctgttagctccagtatttctctgcttagtttttgactatcctttggtaaaagtggggtatgaaagtctcccactatcagtttgtgagtttcaatgtgtgatttaagctttagtaatgcttcattcacaaacacaggtgtccttgcattttggagcatagactttaagagttgaaacatggtcttgttggatttcttctttgatgagtatgaagtatcttccctgtctcttttgattagttttcgtttgaagttattattattggaaattaaaatggatacaccagcttgtttcttaggttcttttgcctggaaaatcttttttctcactatttactctgaggtcttgtctatctttgaccttgaggtgtgtttcttgtatgcagctgaagaatggatccagttttgcatttattctcttaggctgtgactttttattgggaaattgaatttattgatattgagaagtatcaatgatttattgctgtttttaattgttagtggtggtggtggcagtgtgtgtgtgtgtgtgtgtgtgtgtgtgtgtgtgtgtgtgtgtgtgtgtgtttctcttattttgcttttgctggtattagattactaatttcctgtgttttcatgggtgtagttaatctccttgagtttgagttttccttctgatgccttctgcaggtctggatttgtgtaaagatactgtttaaatttggctttatcttttgataccttattttctccctcctttatgatggttgaaagttttgtgaggtattgtagtctgggctggcatctgttgtcacttcgagtctgcaggacatctctccaggcccttctggcttttagggactccattaagaaatcatgtgtaattctaataggggactggggtgaaggttgactaggcctgtggtgtgagcatggggtctgtgggcaggcagcctacctgcattctggcagccagtgtggactttgtttaggcatagggtctcccaattttatattttcttacatttatacttatttcattctttgggtgatattgtgaataaattatattaaaagatttaaaacatttcttgtctaatcaaatactattcattcttagataattggccctacatgttatgaatttagtgttctaacatactaggtccagtagttgctactactactattaatttgaagagtattacttgtcttctttatgatcaatgacaagtgtgtgtgtgtgtgtgtgtgtgtgtgtgtgtgtgtgtgtgtaagttatttccctttgtccgtttctgtttatttctttctcttgtcccactgaactgcatagaaagcatagcagatgtgatgctcatactttatttctggctttatttactaaactctattttgttcatggcaagaacagctgtgaatttgaaaagtttaaaatctttttaacattttaacatggatgggggaatggtctcttggggacgaatcctgactgatgagctattggcatttaaaggctactaagggacaggaatagtttctgtttggaaatgtggaaactgatagtatctcatgcttcagtggatgtccacacacccattcagcaataattggactcaagagtggatcagtaataattttaaactggacagaaagtcaggcgatagacaggggggttcttccccagtaaattggaagaaggcagtaggaaatggttaagttcaaaatacattgtatgagattaattcaaaaattcagtagcccttctatatacaaatgatgaatgggctcagaaagaaatcagagaaacatcaccctttataataaccaaaaatagcataaaaacatcttggggtaactctaaccaaacaaatgaaatacctgtacaacaagaactttaagtttttgaagaaagaaattaaagaagttatcagaaaataaaaagatctcccatgctcttggatagacaggataaacatagtaaaatggcaatcttaccaaaagcaatctacagattcagtccaatccccatcgaaatcccaacacaactcttcacagacctcaaaagaacaatactcaacttcatatggaaaagcacagaacccagaatagataaaacaattctatataataaacgcacttctggatgcattaccatccctgatttcaagctctactataaagccacagcaataaaaacagcttagtatgggcataaaagcagtctggtggaacaaaggaatcaaattgaagatcctgatattagtctacaaacctatgaacacctgattcttaacaaagaagccaaaattgtacaatggaaaacaacaaatggtgatgaaaaagtgaacatcaacatgtagaaaatgcaaatagatccatatttatccccatgcacaaaactcaagtccaaatgaatcaaagacataattacactgaacccgataaaagagaaaggggggaagtagccctgaaagaatagacatagaagaccacttcctaaatataacaccagtagcactgattctgagagaaacaatcaataaacggaacttcctgaaactgagaagcttctgtaaggcacgggaaacaatcaataagacaaatagcatccaacagaatgggaaaagattttcaccaaccccacatctgacagagggttactctccaacgtacaaaaagaattcaagaaactagacaccaaaataccaaataattcaattaaaaaatgagatacaaatctaaacagaaaactctcaacagtgtaatctcaaatggccaaaagacatttaagtaaatgctcaccgtccttagtcattagaggaatgcaaatcaacatgactctgagatactatctcacacctatcagaatggtgaagatcaaaatctctaatgactgcttatactggagaggaagttgaataaggggaacacacctgtattactggtgggcttgcaaacttgtacagtcactttggaaatcagtatggcagtttctcagaaaattggaactcaatatacctcaagacccagcaataccactcttaggcatatacccaaggggtacacacttacatcacaaggacatttgctcactgtgttcatagtagcattactcataatagtcagaacctggaaacaatctagatacacctcaaccaaagaatggataaagaaaatgtgatacagttatacaatggagtactactcactggtgaaaaacaatgacatcatgaaaatttcaggcaaatggatggaactagaaaaaaccatcctgagtgaggtaactgagtctcataaggacacagtatgtactcactcattagtggatattaggtataaagcaaagaataaccagtctatagtccacaaccccagagaaggtatgtaacaaggaaaactcttagagagatgcacctggttccccctgtgagggggaaatagacaagatctcctgaaaaaaaagtgagagcatgggcagtggagaagggaaaacagaaagaggaagtggagtgtggaggacctcatgagggaatgggatggtcaagatacaggaaggacagagagggagagcaggaaagagatatcttgattgagggagtcatgatggggctcgtgagaatcctggcactaaggaaattcccaggtatccacaaggatgaccccagctaagactctaaacattaatggagagggttcctgaactgatcttcccttttaatttgatcgatgactacctgaattatcatcatagaacctttatccagcaattgatggaagcagatccagagatccactaagcactggactgagctcccagagtccaggtgaagaaagggaggagtgataatatgagcaaagaggtgaagaccattttgggaatacccacagaaacatctgacctgaggtagtgggagctcactgatctggactgacagtgggaaaacctgcatagaaccaaactcggccctctgaatgtaggttataattgtgtggcttgggcagtctgtggagccaccggcagtgggaccaggatttattcctagtgcttgaacgggctttttggggcccattctttttggagggataccttgctcagcctagatatagggagaagggccttggtactgcctcaaagtaatgtgccagactttgttgactcctcactggaagccttaccctctctgaggagtggatctggatggggtagggggaaggtggggagagcagtcggaggggagggagtgggaattgggtttggtatgtaaaatgagaaaagattgttttaaaatttaaaaaataagataaaagagactcctagaaatagtggaaagggtgtctaaatgggccttcccctttaaaaagattaatgagtaacccaattgtcatcatagaatctacatccagtaactgatggaagcaggtgcagtgacccacagccaagccctggcctgaactcctggagttctcgtgaagagagggaggagggatcatataaacaaggtggtcaaaggcatgatggggaaaaccacagagacagctgacccaagctagtgggagcttatggactatggactggcagttggggaatttgcatggcaccaaactagaccctctgaatgtgggtcaggtatgtggcttgatctgttgggggagggactgggagtggcaccaggacctaacccaggtgcatgaactagctttttggaggccattccctatggtgggaaaccttgatcagccttgatactggggggtgaggggcttattcctccctcaacattgtacgatagacttggttgattccccaaggaaagtgttaccccctgtgaggagtctatggggtgtgggaaggggcatgtgggagccaggagaaggggagggaggggagctagggttggtatataaaatgaaaaatcatttttaaataaaaaagaaaaaccaaaatacattgtatatatgtgtcaaaacttcaaagaatgaatgaaaatatttttaaaaataggtatgtgtttatagagataaaagatagatttctcataatgaaaatacacctaaataacaataactattaataccagtaatgggacaaggaagaggtatgcttaaaaatagttagaactgccaggtagtggtggtacatacctttaatctcagcatttgtgtggcaaaggaaggcagatctctgagtttgaggctagcctggtctacagagcaagttccaagacagacagggcttcaaagaaaccctaactcaaaaaaaatatggagctaagatattgggtctggagaaatgactttcagtagttaagatcacttattgtacacagcatatgagttcaatttaatgcagtcacatagtagcttttagccgtctgtaactctggttcaagggatgtgcaattcttttttattaaaaattattttttattcaacatgttttgatcatgtttcccaattcctaccagaatcttcccacctccctaccaacacagctttacattctctctatctctcatttaaaaaaaatcaagaaacaaaaatgaaaaaaaaaacaaacagaaaacaaaaatgaaaaaaaaatttaaaaaacagggaataaacaaataaaaaaataccaaaaggaaacaaaagctttcctaaaataccagggaacttcttttttatggttaatatactcagtaacacttccttggagaaaattgattttactttttaaagaggctgtcattttctgatatctagctccttggttggagatggaccctatgcacactgcacttccctgtgtctctgttggaaccacaactgacctaatcccatgcaagtctttctatgctgccacagtctttgtgagatcatatatgcatagtcctcctgtgaagaacagcattgccttgaagtcaattccctcttgatggggaatgtttttatgtgtatgtgtttatctcattagttgatgaataaacactggtggccaatagggcagcaagatagttgggactaggatatgaggaggattctggaaagtgtaggcagagaggaatcgtcatgtgatcccaagaagtgacacagctgggcagaaactgccactatctaatcacagatgtctggaggtctgtacagacagtcaggaagtgacataactgggcagaaacagaatataagcagggacaaacaggaattgctctcttctcttctctgcagagacgctgagttagtcacatgtagaatgtgagaggtgtaacaggttcggactctttttccagaaacataagaccacgtggaaatacttagattgatacttatgggttaataattaagacagagctagccaaataataagccctggtccctgaccaatatttttataaatgatatagcatctgagtgctgttgggggcagagaagggaagcaggaccagctaggacagaatctcacattacaacctctggctcttaagatctttttgccttctcttccacctagatccccaagtcttgaagggaggggtttgatgaatatgtagcatttatgattgggagctccaaaatctctcattctcagcacattgtctagttttgggtctctgtgctaattcccatacactacaagaagaactttctatgatgtgagttgaggaaagtactgatctatgggtatagaagtatgctattcggagtcattttattgctatgttcctttagcaaaatactatttgtgttttccccctaagttagtgatctatctagtcttgggttctttaacattatagcagtatcagacataggttacacctcatataatgggccttaaatctaattttaaaaagtagttggttactgacataataattgtgccattattgtaccagtaggtcttggagataggtcactgttttaggtcacaggctttgtagctgggagatattgacaattgcctttctcttctagagtgtgcaaagtatcttccagtatcacagacagaattcagggagatgaaacttctagttatgcatcaactcaacttctgtgtgctcaatgctataaagaagtgttggcctcagcaatatggccttgccatcagattatagagagtaacccttagtaatagcctgtgatgtctgaggattccatgggaccccttttgccaataattcaacaagatgttatgcaatcctggcattggaggtttaatttgatgacttacagtatctatttggggtcctgtttcctatattatttggagatgcaatttagatacatttaatatacacatatattctaggaagctctaaagcagtaaatttctgtgtttttgaagtagcagtagtaatactaaaagtattacttgtcttattattttcttatcattcttttattgtctgtagtttctgtatggtattcccttcctcatttatagtactgttaatatatgcctttttatttcttatagcagagatactctaattagactctattatattttggccaagacaatttattgtttgtttttgaaggcaattaactacactgctgatcatataagagaatctctaggctactaatagattccagtagcaacacttaatcactcaataaaagaaacaaaaaatgtttcctacatttattctgatgccccggagagtatcaaaatagtgggcatccaatatccctctaggccatctgactttttgtctagaaacattttcttagagtggcacaaacacaaaaggcaaagtaaatttggtataaaatcacaggcattgttataattcgagcaaacagaataacatgagagtgtttgagaaatatgcaggcacacacacacacacacacacacacacacacacacacacacacaaataaacagtaaatgagcaaatgtatgacaaaagcatgatgtccagttaatggtgtagattgaaacctgaagagcctgtagaaatgggaagtcttagcataaataatgaataaaatccatcatggttttagtctgttcagatagagttttcacattagtggaagtatatacagtagaacaattaagagaaaattcaaagaatagtttttatgaaaactttaaggaatataagaaaaacttgcaatgattgagtccaaagtgtgatgatataatccaaaattcaaagcccattattactttaagaactattacaataaaaattatgatacacatgtacaagtgggaaagtgctaaattaaaaggataaaacaaataaaacaaagtggtccacagacttggattctgtatgagtttatgcacatttcatacgcatcagaatatggataattacagaaagataaactaaaacgaattcaaaattttagaaatagttcatcatgtgagcaatatagaccaactctttttagtcctcttcctttgtttagataatgtcaattaacagtgaaaccaccttatattcttcttcatatttctcagcatattccatattaaatttgtctgagacattttactctcatggcaagtatttatccaatggaagatctgcctcctaaagaattaaagacattatcatctgcccagcattcctgttccatgggggctgggtaaacatgatttgagcatcatgtttctttacaattattgataactgagtgtactagctagcgttcactatctctccatagcgcttatctgtttggaatggaaacctgccataattctctcaagaagtttggcaccaacaaacacatcaaactgaatgaagaaaagcccacatggcctcaaaactacacccagaactacaaactagtgaggaaagttggtcacagaagaggttgcattccccacggaagagcacaccaattgcttgttcattgccaagctcttacattcataggatacaaacatagcattttgcagacagaacaggttatatttagggaaaatgtacgtatataaatatttccatataataaaattagttttaaaaacaggccatgaatttgaaagagaccagggaagggtatatggaaagtttgaagggaggaaaaggaagggagaaaagtgaaatcaaattataatctcaaaattaaaaacaaagattttccctttggtgcatattagtaggtatgcatgcttctcaagttgaggaaattgccctcttttcactgtacagccatccacaaaaagatcagtgcttcctatttaaaatcaacaacatttgatttttcccaccttgtaagagggaaaggacagggaatcaccattgttttatgataagcccttacctataaatgtgcatccacacagagagtttccccagaacaaataacaagaagcagatttttcatgaaatgctagcattcacaatgttttggtaaatgtttaacagaaatctttggagtggggatgtactctggaccttgctttttactggaaattgggaaaacaaaattctggctgtcttgaggtccttcccactaatgtgcccaggaaggtgactatgcaaatttgagatcctgattttgtataccttctcagcttttcatacattattttctcagatcaccagaaaacagctaaccaggaatagaaaggctatgtgattgttgagaaaatatctttcctcatttctccattcacagctgcctgctgcaataacaagatggaagccagaagtgttgggtgaaattacttctgtaaaaattagagttccttatccatgcacatacaaagcagattcctcaagtataaagcatctgagaatttcctccatatttctgcctcatgcttgtgtgtgcctcaaacagcccaccatagtgcagtctaagcatccagcaagatcagtcttttgacaaagatttttatttgtgtgtgtgtgtgtgtgtgtgtgtgtgtgtgtgtgtgtgtgtgtgtgtgtgtgtgtgttgcctgtatgtatctatgtgaactacttcagtgtctggcacctgtggaagcttatgtaagaagtttgaaatctcccagaactgaagttacaaatggtgctgctatgtggatgctgggaactgaatctgggtcttctggaagagcagcaagtgttcttcatcactgagccatccctgtacccagtaacacttgtgatagcaaaggaagttttggcacagagaagctggatatctccccattggatgcatagaacatgagacaggatgatgtaatttcattgcatcgatcaccatctagagaatgccctctactgatacttgttctaccttgaatgggtgagtcaggaaagagtacaataggcaagaagggaaatattataacagatttaggatgtatccattttgcttttctaaatattggcagacaaaagatacgtttggtaggaggcataggggcacaagtgtgcctataaacagtagacaggaaggtttctggaaagttttctctctagttctgagcacccacctatgtaagaggctgggtacatgcagctggcactgaagtcaggatcaggagcaaccctggggctgaccggccagctagagtagccactcagtgagacccagtttcaaagcaattttgtctcaaaaatgaagcagagaaatgtaagtggtaccaaatcctacagaaccatagccagcatctggcatggacttctgatggaatcacctgaactccgtcatctttaagtagcctctcctccctagctctctgacctgtagtacgtataacctctctcttaggccagttccatggatgcctgtagctttcattaaagattggccttagcatttctaacatctttgggtctccattgtaacttaggcctcacctctgcaacttcttgcaatgtcttctcaggtcctctgtagggattctgaacctccacacattgcctacctcagtagctttctagaatgctggtgtagcaatgaatgatgtcctttactttgtattttgcattcatgaacaacctatcaagttctgctgaaacttgtgtagtctggcctctttctctctactgcaatggcctctgtatgcctcagcaccagaacccaggaaaacacttctgtaggtgttctattggtttttggttttattattcttttgtaaacacaacattgttttttaggcattccctttgtaagtgaaacctcatctttataagctggatcctttagtagatgaagccttatcattaaggtaccttttctgttttcccagtgcaaagtgtgaggtttctccttaagtctttcataattacggatgctttctctgaacctgctttgtctgcagcatttaaactcactttcatcactaaactgcacattttgtcatcattctgctatttgtcatcatagatctgaaaagggcagtgagtatagccattccttagcccaaatattctattgtttcaaatttcctctgccaatgatccacatttttaaacatattttttatttgaattagaaactagattgttttacatgtcaatcccagttccctctccctctcctcctccctacccgctcacctaactaaaaccctacctatcacatatcctttctgctccccagggagggtgagggggtcatcagagtctgtcatatcctttgggatagggcctaggctcacccccacccctgtttcttggctcagggagtatccctgtatgtggaagtccacacctatgctagggataagtactgaactattacaggaggtcccgtagacttctgaggtctcctcactgaaacccacgttcctgggttctgaatcagccccatgctggtatcccagctatcattctggggaccaagagtcccagttgttcagctcatctgtttctgagggtttcaccagcctggtctggacccatttgatcatcaatcgtccttctctacagctggatttcagttcagttcaaggtttagctgtgggtgtcagcttctacttccaccagctgctagatgaaggctataagatggcatataagacagtcatcagtctcattatcaggggagggcatttaaggtagcctctcctctgttgcttagatagttagctggtgtcatctttgtagatctccagacatttcccagtgcctgatttctctgtaaacctaaaatgtctccctctattatcgtatcttctttcttgttttcttctattcttcccccgactcaacctttctgctccctcatgtcctcctcacccctcctcttctccccttctcattcttctatctccttccccctttctgtgctcccaatttgctcaggagagcttatccctttccccttctccaggggaccatgtatgtctctcttagggtcctctttatttactagcttctctggcggtgtggattgtaggctggtaatccttttctctatgtctaaaatccacatataagacacataagaaagtgttcaacatccttagccatcagggaaatgcaaatccaaacaactctgagataccatcttactcttgtcagaatggctaaaatcaaaaacaccaatgacagtttatgctggagaggatgtggagaaaggggaacactcctccactgctggtgggagtgccaacttgtacagccactttggaaatcagtatggcaactcctcagaaaaatgggaatcagtctaccacaagatccagcaattccattctcaggcatatactcaaaagaagcacattcatacaacaaggacatctgttcaacaatgttcatagcagcactatttgtaatagccagaacctggaagcaacctaggtgcccctcaactgaagaatggatacagaaaatatagtacatttacacaatggagtactcagcagaacaaaaacaatggaatcttaaaatttgcaggaaaatggatggaactagaagaaaccattctgtgcaaggtaacccaatcacaaatgattcacatttttaaaattcactgtgagtcatatttctaggaccccagcagaataaatcccaattacttgtcagcatgtaacatgaatggccctagtgcatacctcagtagagtccttattccattctaaaattaatcatcaggatatccactgtctgcatttctcccagcattccggtttttctcactctcactaaactggcccattaagctctactgataactttctagttctgtagcctcagctctgaactctcccatttccctcccaggaatgagtcttatgagacacggtcaagtttatcactgcaacactctgctctttggtaacaagttttagtatttatttttatcactctgatagcagtaataataacagaagaaaggttttattttggcttatggtttaagggtgcactatggtggtgggaaaatcatgacagagttcatggtagtaggagcatgtgtcaagactcctcatatctgactggaccaagaagtagagagaagagaaccccctgccatgatcatgtcatgtgaattctttgttttcccctttttattccatctggagccccagcacaggatttgatgcaacccaaatttcatgttaatcttcctttctcagttaaacctctctggaaacaccccccatgaatgtgcatagatgtgtgtctgcaaggaaattccaaatccagtcaagttgacaataaaaattaacaagcattaatgtgagccatgctaccttactaaaatatacattgttgatacattactatcatgatacagttataccatttgtgagcaaactcttgtttttctttcttttccttcttcctgccttttgtataaattaagtcacaggataccacattgatagtagtgataagagatgatattgtcttgttaactaccttttgggggcatactcagcctttcggtctgttgctgttatttggtttttgtttgttttttttcattacattttctttttcacaggctatccttgaactcgctgtgtagctgaacttgaactcctggtactattgtctctgcctcaaaagtgttaatgttacagtcattgcacattgtctcttcctgttggccatgccagaggagcagcaagttacaataaagttccagatgtcagcccaccagaagaaaatcaaatatatacatatatcaggctatgtaccctaaagatttaaagtagagctgactgattcatttcgttttcatatatgaaagtttaggtttgtgattcctttaagattacttataagaatacctttcaagataagtaaataagttaattggtctcttctttgtaactgtaaaatgcagcctgcctgataagaacatcctgcttgcccacatggttaatctataacaagttgctctggtatggatgtttgtgggttcttgggataatttgattttcacctgtaatacataaaatgtctaagcatgtgagggagatgaaaaacatgctgtaactataatcattcacttgagaaatggaatgtaactgttttgactcttgtactgcctggaatgttctgttggggtataaaatctatgaaaaaacatgagaggagagagagagagagaataaaggaggaagtcatcaagagagtttgtgagtgcctttttccctaaatcccctcagacagaaaacctgcctcacggactccttggattcctatcaaagccttgtgcttctggaaactggctcccagacagcagtagtccctggtgaacttttccccttttgtacactaggtgcagatggtcctgaaagcctgtaatctgggttaggatattcctctttatccctaactgggcaaagaggttgagttgggggaagaacagaagagagcaagataagagatactataatagagggagacattataggtttaaagagaaatcaagcactagggaaatgtctggagatctacaaagatgacaccaactaacaatataagcaacagaggagaggctatcttaaatgccttctcctgataatgaaattgatgactaattcatatgccatagaatagccttcatccagcagctggtggaagtagaagcagacacccacaactaaaccttgaactgaactgaaatccagctgcagaggaggaggactgatgagcaaaggggtccagaccaggctgatgaaacctacagaaacagctgacctgaacaagtgagaactcttggtccccagaatgatagctgggataccagcatgggacttatccagaccccctcaatgtgggtgacagtgaggagacctttggaaatctatggggcccctcgtagtggatcagtacttatccctagcataggaatggactcttggatcccatcccacatggagggatactacctgagcctagacacaagggggttgccctaggccctaacccaatggctatgacagattcttaagaccccctatggaaggcctcaccctccctggggagcagaaagtgtatggaataggtagggtattagttgtgggggcaggggaggagaggagggagaggaattaacatgtaaaataatcttctttctaataaataaataaataaataaataaataaacgagtaagaaatgaaaaaaagactattagttttctcaaatttctacatgtacttagaaaagattatatttttgtgtggattgattatattaactaatatcagaattctaataaaaattaactctattttgatgcattttaaaacatatttctaaatttgacttggtgttattttgttgaagattcatggatccctacttacatcatatgtaattatgtagttttcttttagtgtctgtttatctttgtataattttggtctcataaatgtgtcaaaaagaaatgtcttttctctgctcaattctaaaggcatttgaattgacgttgctagtatttcatgcttacatgtgctatagaaattgcaagagatgtctggatgaagagcttcatataaagttaattacacaatcaggggccaaggatcctgaccccagcccacagctggactccagcaaagccccaactccatgccaagcagcctgagtgacagaacaaagccaaacacaccaaccaggagcctatggtgctgttggagtttgggggactctctaatgatctccatgtgatgagaaagcatggcccagccatggaaacctgagtaggacaaggacacccacacatagatctgagggttttcaccctggctccaaggagaaaacacatgccaacctggtgccttgtacttcttgtccctctctgtagaatactctgtctccatttagctctctagatgccaccttctctctgtccctaattgaacatcttataaaatagaatatataatattctccatatttatcatccatccttcccaggaatcgacatactccttagaacaacccctagcctacatgtttttcactcgtttattatctatctcccccagctagattgtaaactaagaaagacgttttttatcaactgtctttgcaatataatttcctggggatgacaatgactgctttattgtagattctaagcaagtgtttactgagtccagctgttaagtagggcaaccctttggtttagagtgtatcttgtatacttctagaggtactaaaaatgtaccactaattttccagtttgctgagatagttttatgtaaaatctcacttagcacaatgatgtgagtttgctaggtgatttaatttgggaaattacttcatgtttatttattatacacttgactgaaatcatttgaaaagcctgcattggatacaaattgacaatatggattagtaataaatataaaaagcattaagtgctgggcagtggcggtggtgcactcctttaatcccagcactggggaggcagaagcaggtggatcactgtgagttcaaggccatcctggtctacagaactagtcccaggacagtaagagctgttacacagagaaactctgtctcaaaaaaccaaaaaatgtattaagtactctaacgtactgtataatatggatgcatttaattttgactattatggagctcagtaacatgcatcctgttcatgacaatgtacaggtgttcaatactattgaatagtactcttaaaaaggtaatctacatataattattttaccataaaaccatgtgtacaccacatacacacacacacacacacttctgtttctttacaatctaagttcaccctgatgaaatcagagtcacagatagagcgccccctagaggcgagttagaggagctttttgtccttgcctctgttttaggtggttaccaaagttctgtcatttagtgttcagactgagttccagctctctggtcccattgctttttcctgtttgtgcctctctaacctccttcagcctctcttttgaaattaccatgaaatccaaaaaaaatataaaatgtattgttttcaatgcaactgacatttacaacataaactgtaatgtccaactattgtatctacacagtctaaagcactttcagtagcctcaccagagacccatagcagctaatcagcaacagttgtttcctcctggaagtcactaatctgcttgtctctataaatcaccctatcctgtgtatggaaagagtagtaaaacatgccaccttttctttctttcttttttttttttcctggtttagagctttattggaaatatatgcaaattatgtgagatgttttgaatgaaataaaagtaaaactagagaaccacatcctcaatctcttttccctatagtgatgcagaatttgtaagaattcctatttagaagtgtgacagcgagatgcaaaacttttccctgaactattgtgggccaactgtactgagaagcggccaatgtgggagcattcataggcgacattgagatctgtgccgagcctgttacagagacaattggcatagaagaggaacttccccacagtgcagcagtgccactatcaccatgcaaaggcaagcgccagtgaagaagcacacacacattagctgtgtgctaatgataacatgccaccttttatttgggctacttggacttaaatcttattttaaagcacctcttggtcttctggctaagatcaagcgcagctacatctgaggttcccccggcagtgcagcgtgcatgaatactttgcttactttatagctgaacaccaccatcccatgcgactctgccacatcttggtttgttaccagatgatgaacacatggacttcacctgccttcttgaggtggtgaataatcatgatcaccacatagaaatttattttgacttcttttaaaatcattgaacgtataattaggagtggcaagttctatatgatatcttaattttccttagtgagtgactgccaagttgttttccacagaacctatcccataatggctgtgcttttggttttgaaggagtgtatttaataagtataaagcaaagcagtcagcagtacagaggctctaaggaagactcttctgtgtggacttccagtttcccattcccacagacatctttgaaacattgggtgtagttgggtcctttctgcctgggattgatttacctacctctagctgcattcaagtagacagtgtctaatctaacaagatactctgcttcagttctcacggactttgttgttgttgttgttgctttcctttaaggctttgatgttttattttctttgtctctgacttttccttgttgttgacctgtagaggttcttaatatattctggacactaaatctttacagataagtgatttgtaaatattttcttttcttctatagttatgtgttctttctggatagttttctgcactagttaattttctcatgtctcatgaaacacttaacaagagtaaaggatggagggtttgttttgactagtggattgagggtttggtctgctgttagtgggggcagggagcagaaggaaggagcagctgtgggttgtggtggcagaaatgtgaggctgctttcccacactggggcatgtcaggaagcagaaaggagaattcgggtgctgaaaatggtcctttcaagacatgtgaagaattgtgttggaaatttgatgggaactgcattagagctgtagattgctttgggcagtgtggtcatttttactatattaattccatacatctcttttgatttactggtctgagattctatattccttgtcttttcttgagtgtggttaacctcttcaggttgaagtttttattctggcaccccttccgcagaactggatttttacatacatactgcttaaatttgatttttatcatggaatatctttttttttctccatcagttgtgtttgatggtttttctggtgcagtagtctgagctggcacctgtggtctcttagagtttgtagaacacttgcccagtcctttctgtcttttagagtatccattgaaaatcaggtgttattctttcttttctgctcccgtactgtatgcttttcatatcatgataggcatgtctttctttaggttagcaaaatattctgtgctttttgttgaaaatattatctgtgcgttgacctgggtttcatttccttcctctattcctattatttgtagattgttttatttactgtcccagatttcctggacattttgtacctggattttttttttttttagatttatcgctttccttgatctaggtatccaatttttctatcttgttttcagtgcctgagattctctcttccattgattgtactctgttggtgaggattgccttgagttcctaatttttcatttccagtttttcctcagtttgggttttctttattaattctatttccactttcatgtcttgaacaattttcatttcattccactgtttgtatttatttatagatttcctttaatggattcactcatgttcatttaatggattcattcctatccatattctctttaaggttcttgaagtccctgttttatgcttcattcatattgcatttctcatggcctactgtagaggggttgccatgctctagttgggacatattgccctgactgttattgactgtgttgctttccctagaatttgttatcttcttttttattcaaaaaattatctttcattttatgtaccaaccccagttccccctccctccccttctcctgtgccccacctccccaatccactcctcagagggggtaaggccttccttgggaagtacaaaacctggcatacaaagttgaggaggtccaagcccttccccctgcatcaaggctgagcaaggtttcccaccatagggaataggctccaaaaagccagttcatgcccctgggataggtcctggtcccactactaggggccctcccaacagatcaagccacaagactgtcacacacattcagaggccctagtttggtcctatgcattttccgaagctgaggaagggggtggtagaagggaggggatagaaacatgagagaacaagaacaccaagttgggagaggcatggagggggaggtcaatgaaagagatatctttttatttatttttatcagttcaaattagaaacaagcttgcttcacatgtcaatcccttctccctctccctcccctctcctcaattccctaccacccccccccacctcatcccctgtctgctccccagggagggtaaggccctccatgggggttccccaaagtctttcatatcatcctgggtaggggctaggctctcccccatgtgttcaggctgagagagcatccctccatgtgggatgggctctcaaattcccttcttacaacaagtataaatactgatccactaccaggggccccatagagtgcccaggcctcctcattgatatccatattcaggggtccgaatcagtcccatgctggcctcccagacaacagtctggggtccatgtgctcccccttgttcaggccagctgtttctgtgtgtttcactagcctggtcccaacccctttgttcttcattcctccctctctgcaacaaggttccagagttcagagttcagttcagtgtataactgtgggtgtctgcctctgcttccatcagccattagatgagggtctaggatggcatataagacaatcattagtctcattataggggaagggcctctccaccattgcctagattgccatttggtgtcatccttgtagatctggaaatctccctagtgccagatctctcctcggacctataatggctccctctgttatggtatctctcatcctgctctcctctatttttcccccgactcaacctttctgctcctccatttcctcctcaacccttctccccctctcattctgccagctccctctttcctaccctcacactcccaattagctcgtgagatcctgccccttcccattctctggggtccatgcatttttctcttagaatccttcttgttttctagttcttttggtgatgtggattgtaggctggtgatcctttgctctatgtctaaatttcatatatgagtgactgcataccatgtttgtctttttgtgaatgggttacaaaaacctcactcaggacagtttcttctggttccatccatttgcctgtgaatttcaagattccattgctttttttcagctgagtagtactccattgtataaatgtaccacatttcccctatccattcttcagttgaggggcatctaggttgcttccatgttctggctattacagacaatacttctatgaacatagctgaacatatgtccttgttgtatgaatgtgcattctttgggtatatgcccaagaaaggaattactgggtcttgaggtagactgatattaacccacacatctacgaacacctgatttctgacaaagaagctaaatctatacaatggaagaaagaaaccatcttcaacaaatggtactggcataactggattcggacatgcagacgattgcagatagatccatatctaccacaatgcacaaaacttaagttcaaatggatcaaagacctcaacataaatccagccacactgaatcttctagaagagaaagtgggagatacccttgaatgaattcgtaccggagactacttcctgaacataacaccagtagcacagacattgagatctgcaattaataaatgggacctcctgaaactgagaagcttctgtaaggcaaaggacacagtcagtaagacaaaacgatagcccacagaatgggaaaagatcttcatcaaccccacttctgacagaaggctgatttccaaaatatacaaagaactcaagaagctagccaccaaaacatcaaacaatgaaattaaaaagtggggtgcagaactgaatagaaaattctcaacagaggaatctgaaacagctgaaagacacttaagaaagtgctcaaaatccttgcccatcagagaaatgcaactcaaaacaactctcagataccatcttacaccagccagaatggctaaaatcaaaaacacaaatgacagtctatgctgtagaggaaaaaaaggaacactcctccattgctggtgggagtgcaaacttgtaagaccactttggaaatcagtatgatggtttctcaggaaaatggaaaaagatatcttgatagatagaaccattatggcgttagcaagaaacctggtgctagagaaattctcaggaatccacaaggatgacctcagctaagactcctagcaatagtggagaaggtgtctgaaggggccttcccctttaatcagattagtgactgccctaattttcatcatagaacctgttagtattcaggcattatgctggccaagtccctaatacttggcaagatgcatttgtcagcactcaggcaaaatgtcatggctgcgtaaggctctatatgcatatgcaaagggccctttttaaagcaaggtccacctgtccttttctctctctgtcacttccctttcttggtcaaccattaaggctccctttttactattattttaataaacttccactcagatttgttttattcagattcattctcatcatcaccactaaacatcaataggacctacatccagtaactgatggaagcagatgcagtggcccatagctaagcactgggctaagctcctagagttcagctgaagagagggaggagggatcatatgaacagggggtcaagatcatgatggatgaaaccacagagacagctgacccaagctagtgggagctcacagacaattgactgtgtttttttttttttttctcactttagacatctagaatgtctaattgtttgggatgattgtaattctagatgttgtcactgactttgccttttggggtggactttatggtcattagtttctgtttgccctctctggatcttaggaccatgtgatggctgtgggttgtttggcagagatgcttctgattccctgccaggtgtgaccactgggggtccctggtagaacttgtttctgtgttggaagctgacatgcaaaaatggggatgggctagcaggatgtgaggccgagcggatccataggagggaggaaagttgagtctgccactagggtctgtggaatccacggggaatggtggtagagaaggaagacaggcccctgaaggtggtctattactgggcaagggatgaggctggggaattggaattggagaacagaaggagagggaaatctgcctacctggttccctggccaatgtggccagcagattttcaagaagagaagttaggcatagagtaagggaccgagagaaggactgtattatcctaggaagggaaaattggctatataattatggatgattgtggaggactggaatgggaggaccactcacaatagctaggaaatggaatcaattgaggaatggaaaatgaaaagcatggaacatatacactgtggaatgctgctcatctgtaaataaaaatttttttttttttacctttgcaggtaaggtgagtgaggtgacccagatccagaaagacaaacgtcacatgttctctctcattgtaggcccctagctccagattttcagatatagtcctcatgcctcattgaagaaacttctttttgccacagatgagaccattacagaaaactgcacccaatcaaactacagagttccaggggatgtatctacaaacccccacatctaaaggctcaaggaagattgcagaagacggggaggaaagattgtaagattcagaggacctgcggatttcctgtgagactgtttctcctagtaatgtcagaagcttcacccatgaagtctcaccaacatgaccgtctaaacagtagctgaacaaagacagcaataacaaacacggcagcagaggccacaaagtttcaattctacacaaagaactgcagccactaaggaatgctgagattgggagaaatattcaaccctagggaagagcacatcaggggttatctaacactaaatgcacagcactgaaaatacacgtgcaagtaatattataagacttagcaggtagtatttaagaacgtatatatgagttcatgtacatacctgcccggaacaacaactaatgaaaagggaggtcatgaatttgaaagagatcaaggaggggcatatgggagaatttagagaggggaaagggaagggagaaatgatgtaattatattacaatctcaaaaataaaataaaaagaatagacaagttgaaacaccttaaattgcacaacaaaacagtaatccttgataattctattatacactatttcaagatgtgtaattgtgtcagtcagagtaatggaaacatctaaatgtcatgtttcttgatatattgacatttatgctttttatttcattttactatttttatatatgtgtatatttctgcatacttgtgtatgcatgtgagctgctgtgtaagcatgcatgggtggagggacagaattcaaccttgaatgttgttcctcactatactattcatattgtgttttgaaacatggtttctcactcacctggagtgtactgattaggttaggatgactagccagttagttgcagggatacacccaattctgctttgtcaatgcaggtgtaataagcatggaccactatagcctggctttttgtttaagctggttctgggaactgaacacagatccttatgtttgcatggcaagcagctcaccaactggtttcatctccagcctatttttattttaaaataaggttaatacaagtatctctctaattagatttctttccatttttatttttgctgtctttgtatactatgtaaattaaaaattaaagatacaaaataagtagttcactgtgcatgtattttatttttagatagttgtgttcagttttctatttctgtgttcttagtctggatgcatactgtcatgattactttggcttcatagtagtttatgaaactgaaaattgtgagccacattgtgttaccaaaatgatttggctagtaagtttctattgcaatttaatatacatttgttgtatcagtttttttctgctcctgtaagcaagcattggaatttttgatggatggtccgtgatctatagatcacaatggaatgtattgtcacttagcagtgttcagttttccaattcatgaacggaggatgcttttatatttattaaaacattttatttcagcattttatggttttcaagtatactgtcttataaatgcttggctaaaattattactggatattttattaaaattgacaatttgatcttgtttgttgttgaggtaggatttcattgtgcagcctggctgtcttggaactcattatgtagattggcctcaaagtgacatagattcacctgcctctgtctctgctttctggggctaaaggtgtggactaccatgaacagcttgttagtactttgaaagggaataatttagctttcttttgggagtatttactgtaaatagaaacaattgattaggaggatcttaaattgtgccactcccaaagttttttaagttaatatatagaatatatttggtgcattttaaatgatttttaaaacactttccaaagttttgcttcatagttggttagggcacagccagtataacagggaacctaatattattaaatggacatagtaataaactgctccataagttcttatccattgtatttgtttgagatatgttgtctctgtgtagttcttgaagacctggtgctctctagatcaggctggcctagaactcagagatctttctgtctctgcctcctaagtgttgggatcaaaggtgcgtaccaccatgcctggccaagttcttatgtttgtactaacaaattagtgcatgtctaaacctccatcagagaaccttgtttttttagtagatggtaatatagggacctacaactcatcaacatgtaaagaataagaaaccatttagtgaccatctctaaatggagtatctataccacagccttttcccataaggctcaaggaatattgcctaagttggattagaagactgtgagagccaattgatgtctgaaagcaaaaaaacaatatttgctggacataccagcaccattgcacacggggactcaagcaactgtgactatacacacaagatttgcacaagattaacccagcaagactgctaaccctgatgggagaggagctgaggagctattggtacctaatggctgtggatggagagaggaatgtcagttatccttagggacatggccccaagaagctacccatgctccataggtggcctttcacctatacaggtataggcaacactaagtggactcagtgggttaaaaagaacaaatttgagaggaataaagaggcaggaaactctgtgatcaagtcagacttatcaacatgtgcaaatcaataaagtacattcaaaatacagaatgaggctgcaacaccacagctgaactgccattcctctagttcccgatggtgaccaggaaggtccagagaaggtcagcaagctatgacctcatcaagccttcctcagttcaagagagtgcatgcctttcccaccccaattcttatccagtcatgtcccttcagagaagatcatacatattgggtcatgctgctatttactattagctagcgtgccagcatcaatactacccccaacatttcccattttgtctaattaagaaggaagattctaaactgagcttaataaaaactgtatgcagtatgaaccattatcaagtcctgcccagaagaaagaaaaggtaataatcttaacaaaaaaacaagactgtatacaagaacaattatcaagtaagaaatatatcttggacatgaagagcatcggtagtaggcaattttttagagattactccaataggggtctgatggggaatgtgctgtgtatgtttatcttattgattgttaaataaaatactgtttggccaatgagacagcaagtagatggggctaggagtcaaagaggattctgggaaatgtagtaaagaagtggtgatccaggcaggaagtgacatagcaaggagactcatatttaagtgaaggagaaacagaaaggccccccttttccccttgctcctccagcagcaaatgtgatccaccggcaaagagggacgccaataaggcatccgataagataagtcttataaaatatataggtttatgatagttaagactgaactaacagatgagaatcctagtcattggccaagcagctttgaacctaatacaagtttctgtgtattcatttgggtccaactcaggcgggcggctggcgtaaagcgcacatgtggcagtggggctcagtggcttttgccagaaagatttattgtaacagctgtccttttctgaataatctaggcttgtacctgatatgtctttagctaaaatatgtgtggatcataactgttactatcaaatcttcaatccttccaaagacatgagaagtaaaatatctgagtaaacaggaagtgcaatcaagtgacttccaaaaaatgcaagcaatgacagaaacagctgacttcctgaacagtcaaccgagatgtctctgcaatgttggggcatccacctttggcttataggcctcaaatgtctgtcagaccctttttggaatcaggaaaatttgaaagactgtcctactctggcttggcaaagtttgcagttggcttcttttgtgtgtcctacttgtccaaattgaacagtgtgcttactgtcagtagtggaggcaagggcactttcttgcccaataggccagttttgccaaaaggaaagcaaactcgatatgaagtgtctttcatgcccatcattctctctggagtagattggtgctgccagaagcagacatgcctaatgggaaagaattctaagttattaaaaaacactttaaatgccacatcctgtaggtcttttggaatgcttgaagatcacctctctatttgaaacatatctctgcatgcccagaaaacctaattagtgtgactatacatttgacaaaaatgagtgactattaacctctaattattattaacctatataacttgaagactaaagtttcatattatataaatacacaagctaaaaaggtaataccttatgcaaaatagaaacagatgcatagtataaggataataatctcgaaattgtgacaatatacaaaaatgtcacaattatactccagaggtagaaatgtataatgcaatataaaaaataacctaaatttgcatcaatatacaaaaatatcttaaacagaagtagcagcatatatatatatatatatatatatatatattatagcaaaaataattttacacttgtatcaatatacaaaaatattttaaacaggaatagaaacacatatatggtataacaaaaataactttgaatttgtatcaatatacaaacatccataccaatttaaaactgatagttgcttttttagtttacaagtgggtttaataatttaccttttaatcctatcatacctatcccctttattttctattccaaaagagatccctgaaactctttatcttattgtcttgggtttgtgccccatgttgggcaccaatggatagggagagaattctgtgatcaagtcaggtttattaacaggtaaaaatcaataaagtacactcatagtacagaatgagactgcaacactgctgctgagctgctgctcctctagttcccaaaggcaattgggaaggttaccaagcaaaggtcaccaagcagtgtcctcagcaaaccttcttcagccccttcctccccccaccccctgccagcttcttatctagtcacatcccttcagagaagataatggccagtgggccatgagaggggcatcaatacttcccacaacagaggggaaaggagaggaatcagaagcagcaaatgggttggatttgatgaacacaggatatatgaaaatctcaaacaacaaaagtatgagtagaaagatgatgtaatctaatagctgtagtttcatttcttctatgttaattgtcttttagtgtacttttttggactgttctggatagatgcttctgaagaattttgagcagaacagatgaaaacaagaacacttgtcttgtgggtaaacttacataacaggtattctttcctttcccttttaccaatttcagaaatgtcacacttgataattcattaaattttcaaaatgggactagacagatggatcagtggctaacaacacactctgtacttgcagatgatacaaggtctctcttgattataatgttaactatgagatttaataattatttttgtagtttgtgaaattgaagtctattactagctatctgaccaactttagcacagcttacatttatcatacattaataagattattctgttttgcttttttctacattgtattaatttgctttttacatgattgacttttacatattacatatctatacatttcttggaatgaaatattgtttcttacagtcttggttactgttttattgctgtgaagggacatcatgatcaaggcaactctcataaaagaaagcatttacttggagagttatagttttagagagttagtctctgattatcatggtaggacatagcaggcatggtgctagaacagtagctgagagcattacatcctgatcttcatgcaatagacagagattgagagcgagagagaatgagagagagggaggaaggggggaaagaaggaggggagataaaccaggcttgggcttttgaaacctcaaagaccacttccagtgacacacctcctacatcaaggccacatctcctaatcctttccaaacagtttcactacttgatgactaaacggtaaaatataggagactatggggactgttatcattcaagctaccacagaaaccatgtggaaggaatgatggatttcttttatttttgtattgataaatgtatattaaacagagatattgtctaattttatttccctaatatttttgactagagttggtattaggaaatgctggcttcacagaatgagtgaggaagggtttcttagatgtgtctgtgttcataagaaaaactgtcaggaaaatgtaaagtcaggttagcttcatttgcaatcagcaaacaggaaatagaaaagaaaggtagtgcatgtctatagttccagcacccagaaggctaatgatggtctgggctatatggagactatgtcacacacacacacacacacacacacacacacacacacacacacactgcacaataaaaacaacacaaagttttcttaactgatgaatggaaggagcaaagtgtaaagtttacattaggaaatataaattcattacaaaaaagattcttccactgataaggcaaaatacaaacagaccacaaatataatattctaagtgaaaggactggaactgatgattacatatcctagaatctaggcaaagctattgtaacaaagattacattgtgtggataagaaaagtttagtattttccagagcaagcaggtagaagaatgtgaccactttgaaaacatgcactaaggataatcatggtaggataacatgaatataccttccacccaattttataccctctatattaaaatgtttacttattgctgtctataaattatacattaattagaaaaaagaagtaatgggtgatataaacatatatagacacacttaaatcctctagcttggtcccaggtgagactgtgtttctttcttaggaaggtgaaatgagaacctacagatgtcctcatggggaacatctccagagagttcaatgaattaataatgcccagctagtttacatatatttttctctgaagtcagatgttagtttagaagaccagactgtaccatctttggtcattattcagtcatctgaatgttgatattttcccccacacaactggttttcttttgacccagagatttactaagaatctacaaccatggttgagaaaaacactgagataaaacctgtactgaacaccctcagagaagtgaccagttagcaagctctactgtgtaccttcctattcttgtgctttagacacaactctgtggattatatgggagaggcaatgttataatctttccttcacaagtaaggaggaagtaggagagctctctaaggatacagggaatgcatgctaatctcatggctgggattttgggtgtcttttctctggtctttgttgctctagaaagttcagcaccttttggttttgccctgccaaggagcccctctgatgatacccatgcatcactccatggaaggacttctcactgcaaacacattgttcagaactgactgtcactcttgtgcaaagagcaaggtaagccttatattcaccatctagttttagtgcaaagtccagctcacacaaaagtagtgttagaagaactactgtaagtcatttgagcacagaattcaagggcctgaacgcttttctaaaatcagagttacatctgtcttgcaaatgtcgaaattttgtcactggagagctgaatactggctatgaaatatcagtgtcccgctttctaagaatcctagtgaaatagtagagatgaggcattggctggtcaggtaggaatttaattttatttgttatatgttgacttctcttgggagagttatttttggagatttttgtgtatatggaaagtttgcttgtaggtatgtttatacatcacatgtgtgcagtgttggtcaaagacagagaaagtcattggacccaattacaaatgactatgagctggaatgtggatgatgggatttgcacttagttcatttggaagagtattcagtgctccactgaaccatctcttcaccaccaactttatgttggagattaaaagagtaaggtaaaatgattaatttttaaactcaaaaggattttaaacaaataagcaaaggacctgatattcactttaactttgaaatttttcccttaatgtcataattttatttttcacaatatagacgttaattcataggccatccatacaagtaaaagtaaataggatgaaccttgtttaaatattgaatcttgacgctttgtaacagctgtggaaatattacttaatttcataaataatcaaatgtcttcatggtgaataaggaatgacattatctattttatacatatacagctgcacttatatgctcacaagttacacacataccaattccttattatatgttgtagcacctaatatattcagaaagtgattgtgctattaagtcttgcatgcagctctcaaaggctaggcttgtcaggtgaactgctgaaacggggaggagagtaacaataagaacctgtagttggtagaggatagatacacttttatgagcttgaaattcaaagaaaaagatttaaaagtatcgtgtatatgttagaaaagattcaaacaaaaacttcaaacataaatttttcactaaaacaagttgtggacttaaatacagctcacaatacatgaactttcaacttttgatgatgtttgtgtttcaatcaagtcatggcaatcccaagtaagtgaaagaatgtactcaagctgaaatatagatatgtaagaagatattaaacaaaagagtggttcatatggaatacataaaacagtcagatgagttactgagggtcacataaagaaacactggactgagtgtgtagaaaaaaatgggtaatgagatttccagacttcaacatgcattcacccctgatgccctgcatgttgctacaaacatttctcagatatcaaaaagggcaacaattacatactaatacctagtgatgatggtggtggtggtggtggtggtggtggtgacatagctactgttttttccagttagaaaatgcatttctcatttaatttagacaataatacctcaatatgacacacataatcatctttattttgcagatatagataatctagcttaggaaagttggactagggcctgtggttcttgggctgaaagttaaggctggaatgcaattctccccaaaaccaaagttctcttacctgatgctgctggatactctacccttctttgctataattatctctgtgtttatagaagccccttctgcttcagtcatctcactagatctgcattgtatgtgtctctcactgagttcactgggaaaagccctaagattgaggtgatctagcaaagacaatgtctcattaataattgcaacttgatttgaatttagtttacaccattgaacttgataaccattttgtctggtaccaaagtttggcttataaattagtttacttttcaacaagattgtaataatcagccactgatgttctgccatttaagaaaaagtacctgctatttaaatttcttgagaaatcaaggaaaatttatgcaaacatgtccacagggcaatccatggcacattgcatacatggaagtatgccaataattgagaataggaaaagacaagattgatatattagttcctcaaatgtcacattggacaatccattaaattttcaaaacggtgctacagaaatggcccatccataaagaatacatgcagagggctttgagttctgtcaccagtacccacatcaggtggttcacaaacacctacaactccaactccagaggaactgaagactcttaattccacaaacacttgcacacacatgcacatccccacacacaaacacacataaataaaaataactcgagaactattacattttcaaaatattagtatatgtaagacttaaaaactggagtgacgagctttgtctacacttcattaaattgcatgaattcctctataagctgatgtacaaatatttaatcattggtggatgtgatggagcacacctttaacccagaaccctgtaggcagaaacagacagatctcaaggagattgaggtcagcttggtatgcatgagttctagaccatccataagtccatattgagatcctgcccatttctattgtgattcctatgactactatgtttatgtgcatgatatatgtgtgtgggtacaggcatactgtggtgtgtatatggatagcaaagtaaaaaatttcatgtgttactccccaccttttcactgtggaatcagagggttgtactcaagtcatatatcttgagagatgtacttttacccagtgtaccatctcactggccctggatgttaagaatctttggagtccatgtttttgtcaaagtgaaataatgcagggctagaaagatggcgcaatggttaagggcactgcctgctcttccacaagtcctgagttcaattcccagcaagcacatggtggctcacaaccatctgtattgaaatatggtgccctcttctggcctgcagacatgcaaaccagaacactgtagactaaataagtgaatgaatgaatgaatgaatgaatgaatgaatgaataaataatgttttaaaaaagaaataatgcctgacagtggtacaaagacatttcagtatcttagtaatctctctacattatctttactacagagcatcgatctccttattcccagataacactgatggggaacaggacagagacaacagagttcattcttctaggactaaccagtgccccagaactgaagattcctctgtttatcataatcagccttatctatttcattaatgtggttggaaacttagggatgattgtgctgattctttgggactctcgactacacactcccatgtactgttttcttgctaacctatctctggtggacatcttttactcttcggctgttgctccaacagttttggctggacttcttgtaggaaacaaagttgtttcctacaatgcttgtgttgctcagatgtttctattcgcagcctttgtcactacagaagatttccttttggctgcaatggcctttgatcgttatgcagcagtatgcaaacccctacactacaccaccataatgactccaactatgtgtatatgtctgaccatggcctgctattttggtggtttcctgaattcctccatccacactggggacacattcaggctctccttttgtgggtccaatgttgtccatcactttttctgtgatgttccagcagtcatggttctctcttgctctgatagacatgtcagtgagatggtgcttgtttacggagcaagctttgttatctgttctgcactcctcctgattttgatatcctacacattcatcttcatcaccatcttcaagatgcgctcatctgcaggataccagaaggctatgtccacctgtgtctctcactttactgctgtctccattttctacgggactcttattttcatgtacttacaacccagctccagccactccatggacactgacaaaactgtgtctgtgttctacaccatggtcatccccatgctgaaccctgtggtttatagcctgaggaacaaggaggtgaaaagtgcattcaagaaagttgtggagaagtcaaaatattccctaggattttgagtttagtgtttagtggtgcactgtaatgcagcttcagggctctcaggtcttctccaggtacctaatgtcatttgcactttacactgatgttaagtagaatatgctcctcttttcaaatggttatattttagaaaagggaatcaaagatgtgaatgcaataaccattttggaatggctaaaaggaaatttaacatgcagacctgtagtgtatttgcctattttctgagttagacattttttgtctttattcttcctctatagttgtaggcttcatctgtgagatacttgcattattttctaaaattcccatttcaagtgaatcatctcaatttttttttacttttaaaaggggaatcagatgatttctgtctgccactggatgataaaaaacaactattgaacattctgttgaactacaatcatatgttcttttcagggaggaacttttatggactgaatatatgcaaaggtctctagttaatttagtgtgtatatttatatgtgtatgcttatgatgttaagctaaacacaaactcatgttaatatctgactctaacccacctgtgtattgaatcaatctatttccatttataacttcctcctcgggttgcttggaaacatgagagccattatcttgtattcatggatttatttattcatcttcactaaacaaagaaattccataattgttcgttggcatcttactaagaaatgaattatggaataaaagtgtcacattggatggcaacacagaatactttcgatgtcaatggaataatttctgttttggattgtttactgctagcatgaatcttgaccattctaaaggatttttagttaatggattttgagcattaaaatttaagttataaggatcaaattatcttaaaatatatataatttcattttgtgagtatcagatagttgttttaatttagttttcttgactgttgttctagataggccttctgataaattccaacaaatcttatggaaacaaactatctgctttgtgcctgatattacgggagaggcttcatcctttctctcttgaatgtcccataactgtttatcttatgaaattcatatctagccctaactatctttatcaagaaagagaaccttaacaagtgcttagtcagtttagtgaaatgtttgtttttactttttcttcattgtagtaatttgttttatcttgtggttgacttttatgtggtgaagtaccttttcattcctggagcatcacaataatagtttctaactatgtttaaactgtgatatatttattttgttcacattttgggtaactatctctgcttattcaaaagggttattgtctgtaattttctttctttgatgttttttcagctttggtttaaaaaagaaatgttgatttcacagaatgagctacaaagtgtttgctagtattgtctgtggtcataaggaaaactttggggaaatagaagtcatgctagctttgtttgtagtcagcaaacagtggaaagagctgagcaagttggtgcatatctataatcccggcactgagaaggctaaggtgggtctggcctatagcgagtccctgcctcacaacacaagaaaacaaacaaatcacaatcaaaacagcttaagtgtggcataactgagggacaaacactgtggcaactgcttatcatacaatataaatgcacaatagaaaatattttatgaccaagaatgcaaaattacaaatgacctcaagtgtaaaaatctaagtcaaaacaatcaaaaacaatgaccacattaccaagggtctggataaaacaatcatcacaaaggtaaacatatacagacaaaaaaggtttggttgcttgaataactgaccctccaagagcttgaaaaagaattaatgaaggatagtcgtgggagtggtaacatgaatatagctttgaccaaattgtggaggatatatactaaaatgttatttattggtgtttataaattacacattaactggagaaaagaggaaataatgggtgataaaccatgtatgggtacatttaagccatgtatcttagatccagcaagagtttaattgctttttccttagaaaggtgaaatgaagacatacaagtgtcctcaaggggaaaatccccagagagctcaatgtctgcataatgcctggctagctcatatgcactgccctttgaaattagtcttggtgatcgcctttgaagagtcagatgaaaagatggccactttggttatccttcagtcatctgaatattgatatttttttccccaaaacactggttttctgctgaactggagattttctaggaatcttcaaccatggtcaaggtacaaagatatgaagataaaacctgtgttgaacaccctcagagaagtgaccagttagcaagctctcctgtgtgccttcctccacctgtgctttacagacacaactctgtggattttatgggagtggcaatgttataatctttccttcacaagtaaggaggaagtaggagagccctctaaggacacaggtgcaggctaatttcatggctgggattcttagtgtctttcctctggtctttgctgctctagaaagttcagcaccttttggttatgccctgccaaggagcccctctaatgctacccatgcatcactccctggaaggacttctcactgcaaacatactgttcagaactgactgtcactcttgtacaaagagcaaggtaagccttatattcaccatctagttttagtgcaaagtccagctcacacaaaagtagtattagcagaaacgctgagtcatttgagcacagagttcaatggcctgaacccttttctaaaatacagagttacatctgtcttgcaaatatcaaaattttgtcactggagagctgaatgctggttatgaaatatcagtgtcctgctctttacgaatcctagtgaaatagtagagactcatctctagcctcagcactggctagtcaggtaggaattttatttgttttatgttgacttcacattggaacttaaaaactataaactaaaataatgagtctttaaacctaagaaaggattataacttaatgagagaaagagctaatattcattttagtaattcccactcaaatcccataatctcatttaaccacagacatttatccataggccatccatatgagtaaaaacagcagtgttttgtaaggatgaaactacttaaatatggaatcgtcactcttcaaactaactgtggaaagctagaatatcacttaatttcacgtacaatgagtggtaaacaaaaagtggtaatatttttattcacatgcaagcacaattatatgcaatgtagcaacacacatatttcctcattaggctcttgtagcaatttgtaacatccagtatgtatatgtggttgtgtgtgttaagttttgcctaaagccttattagctaggcttgtcaggtgagctgccgaaagggttagaagaaacctcagaagtggtagttggtaaaagacagatgtacttctaagggcctaaaattccagtcacagaatttacaggtattacatttttattagaaaagattccatcaaaaaattcaaaagtagatttgtcactaaaataagtcatgtatctaaataaaatgcacagtctatgaactttcaacttttggtgatgcttgtgattcaatcaagttatggcagccctaagcaaaagaagaaaatgaactaaagctgacatagagatatgtaagaaaatattaaacaaaagagtggctaatatcgattacatagaacaaccaatccaataagcagagcatgaattattgaggttcacctaagactcactggactgtttataaaaagggaaattggggaatgagattcccagaagtcaacattcatccacatatgatgccctgtatgttgccacaaacttttcccagatctcaagaagggaacatatcccattctaatacctggtaatgatgatgatgacgatgatgatgattgaagacatagtaatcatgcaattctgctagacatcagtgttttgttcatttaaaatgaattttctcatttaatttagaaaacaatgcctcaacactgaacacattatcattctcattttatagatgtagaaaatctagataaggagagttgggccagggccatcgattcttaggctgcataagtaagtctggcatgcaattctctccagaaccaaagttctatacttgatgttgcctggttcccttccctcctttgttataattatctatgtgtttatagaatcactatatgtttgtgtatgtctctcactgagttcactggggaaagccctaagactgagatgatccaacaaagacaatggctaattatgaattgcatcttgatataatcttaggttacgccactgaactggatggccatttttttttctggcaacaatatttggcttgcaaatcagttttgtcaacatgtatgtaatacttggcctttggtgttctgaaatctaagagaaagcagccattgtctaaatgtggtctgaaatgtgggagtatatgtggagaagtgtctagagagcagtccttagcacatttcacacagaggagtctgtaaatgcatagggatgggaaatagtgaactgattgatttacaaccttcagaaatgtcctgttgggtaattctttaaattcccaaagtatcagcccacaaatctataagacttacaactgaagtgatgacctctaaaaatacttcatttcattgactgaagtccttttggaaaaatttctcatttagctatatgctttagttacagagaatctttcatttttttgttgcgagtgtgtgtgtgtgaatatgaggtgtgtgggtgtgtgcctgcagtctctatgtgaaggccagtggacatctcttgagacttgtttctttgcttgcacactataagaaataaatattgaattcagactattaggctttgtggcaaacactttaaatcagtgaaccatctcattggccctagttataaagaaatttgaaacacatactcttttaaaaaaaaataagccctgcatttggcatgaaaatacattaacttggtaatctcctttgtattaataaatgctcatcacttctctttactacaaggtgtctctgattcccaaataacactgatggagaacaggacagaggtgacagagttcatccttctaggactaaccagcgccccagaactacaggttcccctctttatcatgttcactctcatctacttcatcaacatggctggaaacttagggatgattgtgctgatcctctgggactctcggctccacacacccatgtacatttttcttggtaacttgtctctggtggacatcttttactcctcagctgtcactccaacagttgttgctggacttcttgaaggaaaccaagtcatttcacacaatgcttgtgctactcagatgttcttatttgtagtctttgctacagcagaaaattttctcttggctgcaatggcctatgatcgctatgcagcagtatgcaaacccctacactacaccaccataatgactccaactatgtgtacatatctgaccatagcctgctatgctggtggtttcctgaattcctccatccacactggggacacattcaggctttccttctgcaagtccaatgtggttcatcactttttctgtgatgttccagcagtcatggttctctcttgctctgatagacatatcagtgagatggtccttctttacggagcaagctttgttatctgttctgcacttgttgttattttgatatcctacacattcatattcatcaccatcttcaagatgcgctcagctacaggataccagaaggccatgtccacctgtgtctctcactttactgctgtctccattttctacgggactcttattttcatgtacttacaacccagctccagccactccatggacactgacaaaactgtgtctgtgttctacaccatggtcatccccatgctgaaccctgtggtctacagcctgaggaacaaggaggtgaaaagtgcattcaagaaagttatggaaaagacaaaatattccctaggattttgagtttagtgtttagtggtgcactgtaatgcagcttcagggctctcaggtcttctctaggtacctaatgtcatttccactctacactaatgttaagtagaatatgctcctcttttcaaatgtattttagaaaagggaaacaatgatgtgaattgttttaggatggctaaagggaagtttaacacttggttgtatttttctaaatactcataatcatatcgtttctacatgccactactaacatgcctgtaaaacaagagacaaataaaagcccatgagaagtgcctgcttgtgacccacatgggcacataaacacagaggtagaaaagtatccagacataaatggaatactccttttctgtgtgtttgtatatatgcatgtttgcatatgtttttggcatatgtctggatggttctacacatgtgcaggccagagaatggatgtctttctcaatggttctccacattattcattggggcaggcaagtgaacacagatctggaagaagaactagtctatttagcaaactttctctggaatcctacctctattttttgagtgctggtattaaacacgggcccctgtggtttcagtgctggtattacagatgggtctgtatgctgtcctgacatttatgagaattccaactccgatcctcatgcttgcatggcgaatgctttatccaccgatccatcccagccacactgctagtatccaataaaacataagtatccaataaaacatagttcattgggatattggaatatcatgtatgattgtttttctctagttgaataactattctaattcctctaagtgatgcagatgtaaacacatgggtccatattttatacagtttagcttttttcctttttctttacttttttctcagacaatgcattacaaagcagactcctctcccttccttcaagttccacccacctcccctctcccccagatccactgctcctgtttctcttcagaaaagagcaggcctcttagtgatatcaaccatgcatggcataacaagaagcaatgagagtagacataagccctcatatcaaggccggatgaggcaacctagcaggaggaaatgggtcctacgagcaggcaaaagaatcagagatacccccaattccaatgttaggagttccacaaaaacttcaaactaaacaaccacagcgtgtatgaagaggttctagaccagagccatgcaggctccacaactgccaattcagtcttggtgaatccctatgaaccttgcttagttgattctgtgggctgtgttctcttggtgtcctccaatcctgtggctcctacaatacttcctcttcatcttacacggggttccaagagctctgcctagtttttttctgcatcttctcccatcagcgtctggaggaagcctctctgatgacagttgggctaggcactgatctatgagtataacagaatgtcattagaaatcacttaattgtctttttgctgttttgtttttgtcagtcatgtttggttctatttttgatctctgtaatgatctgaaagaaaatggcttccataggttcatagggagtgacattattaggagatgtggccttgttggagtagttatggctttgttgaggaagcgctgttatgataaatctttccaccatgggctttgaggtcttaaatgcttaagccaagtctagtgtgacatttgctttctgctgcctgctgattcaaatgtagaactctcagctccttctccgacaccatgtctgactacatacctccatgcttcccaccctaacgataatggactaaacctcagaaacgctaagccagctccaatgaaatggttcctttataagagttgctgtagtcatttggtttttgtttgttttgttttttttgttgttgtttttttattttttggtttttcaagacagggtttctctgtggctttagaggctgtcctggaactagctcttgtagaccaggttggtcttgaactcactgagatccatctgcctctgcctccctagtgctgggattaaaggcatgcgcctccaacgcccagctgccgtggtcatttgttgaaggaagtttctgtcctgcccagttctgtagctgttcagtcccaaataaacatacagaggcttatattaattacaaatgatttggcctattgctcaggcttattcctaacaagctcttacaacttaaattaacccataattcttatctatgtttagccatgtggcttggtaccttttctcagtaaggcattctcatcttactttctctgcatctggctggcaactctgtctctgccttcttcttgccagaattctcctagtctgctagtcctgcttatactttctgcctggctattgaccaatctctgttttattaaaccagtacgagtgacagatctttacagtgtacaaaagcattatcccacatcatttctcccctttttcttttcaaaacaagaaccttgaatctaatcacctttgtttagccttttttcatgaccattatccataacaacttgtaaccaatacactaaacaaagggattaaccatttgtgtaactatccacatatgcattgctttaatagtgccctggcacattcatgttttctatgtattctctctgccagtgcttctgaatgctcaatggtgctcatttttccctaatatagttgtatcatctcttctcactcacacattctctctactctccttgatgttattctcaaacacaagaatgtctccacctcaggatgcttgagcttgctgcttctctgcatggaagtttccctcactaagttcaggtctctgcttgaacagatggagagccttccctgactcctatataagacaattaatgtgggatgtcctgtatgatacaaatatgtgttgtttcagaatgactgtgaaatgtctaatgcgggagctaagagccaaattcaggccctctgcaggggcagcaaggtccattaatcactgagccatcttttcagctccatcattgtcattttgctcctacataggaaacaatgcgcattcttcctgtgcctctcttatttcacctaatgtacttcagttctaaccaatttgctgaaaatgaccagatttcattcttaattttggtaggaaaaattccatcataggatgtacaaaattttctctataatttttttgttagtgggcacaaaagttgattccttatctctgctaattggaacagtattacaataaagatgtcagttcagacacccctttgaaatactgactttaagtattttttgcatatgtatatacaaaatggaatagcttgatcatatcatagacccatttttaagttttttagtggacctctatactgtcatcacaatggttgcattgatttacattttcactagcagcatataagaactcttttccctatagatgttcatcagcatttatctttatttgatagtagatattatgattatagtacaaatatatatccatagtgttttggttttcatttctcagatacccattcatgttgagcatctttctgatatttgttttccattgtagttcgtctttcaagaaatgtctatttatatcatttagccattttaataaattattaaaagtttcattttacatctatttatttatttgtgtatgtatatgggcatgtggaagaagccagttttctccttcaaacatgtgtgtcctggatatctaactcaagttgcaagcttggaagcaaggatttctacccattgagccacctcaccagtccaacactcagttatttttaattgagttttttgttgctaagttttttgttttgtgtttttgagacagggtttctctatgtagtcctagatgtcctggaactcattctgtaggccaggatagtctacccacagagatcgcagaggtctgactcacagagatccacctgccttctgattgtttggattaaaggcatgtacccctactgccctgccttgttttaaagtttttgagtccctatatattctagatggtaattacttattatatcaatggattttaagatattttctctaactctacatcttggagaaatctttgcccggtttattgctttttgttgtgcataagttctatagttggatatgattcattttgtttgtattttgtgatcatgtacaaaatactattatgcatactgctgtcttaagtcacttttattctttcttcttacagtttagttagttaaagttttatattcagttttttgggttttgttttgcttttcatcattgatttgattttcgtataggttgaaaaataggagccaagttttcctttgcataatatatccagtattccagaaccacttccttaagaggccaggatggtctctctctctatctctctctctctttctctctctctctctctctctctctctctgtgtgtgtgtgtgtgtgtgtgtgtgtgtgtgtgtgtgtgtgtgtgtgtgtgtttcagtaatcacttggcagaaggtgtatgaatttattcttggatctctagagtgattttttactataaatccaggcttgctttgaactctcaatctttccacatccgcatctccaatgctgaggtgcactgtgtgtcagctgcaggactatgctgtttggattactacagttctgtagtataacaaactatttgcatgcattaactttttctactttttccttcctaaacaagtattttttctttgaggtttcttggggatgacaaattgttcatttgagttttgttaagccagtcttttctttgggggaaatttagcccatttctaatcaagactattattgatatatgaaaacttactctgaccatttcattttgtcatttttttcttttttctttattcttctctcatatattacatcctgactgaagtttctcctagctttttacatcccaacctctctccccacctcccatctgccccagagtcactctatctctctttcccttcagaaaagagcagacattccagggatatcaacctaacatggcatagcaagttacagtaaaactaggcacagaccctcatatcaagactggacaaagcacccctgtagaagtaaaagggttccaaaagcaggcaaaagagtcagagattgttttccatgtcctttgctatttccttttgtttatctttatggtttggtggttctcactattgacaagttttgtttttttcttatccctactgtgtatctactcttctaataatttgtgtcttttatgtgttttcatttattacatttatagaatctttgtaaaggcttctctgttggtggtgaagtacatcagtttctgttttgaatattgtttgtccttcatgttattattttgttagaggaagtattgttgggtggaatttttattggaaatgtcttactgtttaatcctgacccacaggtttctgctaagaaatcttttaaccacatctggggttcattagtgtgatctagtaccttttcttatattttgtcttggacttttgataggttaactatgatactcattttaaagccctctcctgagaaatctatctggagtccattggcctttctcaatcagaaaaattaatattcttcacttccatcaaccatcaaactttcagctattatttcattctaaaggacttttacattttccttgtctatttgtgtaaagtttgggaatttgtaatacttgatggtgtccacaaattttgtagactaattttaatttttgttttgtttctttgcttgttatccatctgattcagaaatttctccaagatcagaaatcatttcttttcttgaccttgtctcttgataaaactcttacttgtatttttaaagtttaatttactgaactcttcatttccaagattttcctttaggtactttttcacaatggctacccttggtgaaagtccattcatattatcgattgttttcttggaattcattgtttatgttcttttttgaaatatatatcactgacaattattagaatatacatttgaattctttaacaagcatctcatatatcttttccttttgagtttgtggctagagagttagtgcattcctttgaggtatcattctaccttgcttcttcatattctttgctgccatgtactaatattttcacatctagtagatcagggttctctaccaattctgtaaggtaggttttataaccctttttctgaaaatatgtcttgttataccaatttggaaggttccatgagcttttattccattctctatgtactttttcagctgtaaccagtggctttgggttcagtgtgattggcaatagagtcagagatctctatgtccaagcttaaaggtactctagcatcccgggaaggagtaatacatacagcaatgtggtaggagtataggttcataagcagtggttcatggagaaaggccacactgaaaacatgaacatccattttcagtcccaagaatactgtgtatcataagtagacaaccaggttggaaaacaagaagttagagttcacatcttccctcaaacctagcagtgacacgagtttagattttgggtttcggaaatctaaagagaaaacaatgaatgagagtagaatgacaatcagttttaaatatcatttggtaatgaaaatgatggcatagtttactacataaaatggcaatatgaaaaagaaatgttgaatgtcgtgacattaatagtattgtttagtaatgtataaactaacataattcttcctaggtgttgtagatatactatctgcatgcattatttctctaatttgattatatgtttttaaatcacagaattacatgtattgtggcttagtctaaactcatgattgtaagattgctggctggagtaaggacattagctagtgtcataacagaaaagcagaagttgtttattgagattggatcttaagcaattatgtgtatgacttaaaagtcactgtaaggttgtatcttctgtctgataaagagaattaatacatacaagaagtcagttgtagaaaagaaatggatctaatgtgagagagaacacaaactcaccagaaccaagggaaactgcttttgttgttgttgttgttgccttttgctttggtggtgtggatgtccttttaggctccaatgtaaagctggggacacacagtttgtcagtatgatgagtagcagatagcagacatggggacttgccagcctatacattatccttgggtgaaatgtgcaaggaagaaaattccaggacttgtacttcctggctgagtagatccatcacaaatccccccatggtaagtttttaataaacattgattagcatgattttaagtaaaattaaatcataaaaattgtagcaacagtaattaattgctgtatgggatacacctctatgttagaatttgtgcttcagcatgtgaggccctaggctcaattgccagtaataaaaaatattgttgttctgaataaatatttgatatagcagtgacataaacttctttaaaagaaaacagtgaagttttaaagggtaagaaataaaggttcctttctcagttaaaaaactttaacaaaaattttaatcagtcaatgaatggatggatgaatatgagtggattggtaatctggtcccaaggtaattgtgagagttcgtttagcttacagtaaagctgtatcaaatgtgtttaaactttaacaacttagagatttagaaaagaagctattttattaagaggactgttgaaagatggggaaatgaagagctgttacaatttggagggaggaagcttttactagggatacacctcagaacaagatatctgcaaacatttgagaagtaggaagtaaaagcattaggtacatttgtgtttcaattagaaatgagtaattttctgcttgctggtgttagctttggctgagagtgggtcaaagattactttttaaagcttaatccaggtagtcaacaggaacttggtttctgataaatcagtgaagttcaacagtacagttaaccatttataaggaccaggatggcaggatagtgtttatgtcagagaattttttaacttaagttcaacctgttcttggcatgggttcaaagagatgttttagaccgagaggagaaaaatatggccaaagtctggctaataagtatttttcttctcatttccatcctttatgagacaaagaggtcatgttctgtcttgttcttagtaaacagatcttggggataaatctacattaagtcaggtgggttgaatgggatcttgcaataaactacttccagaggacagggtgaaatgaaagtttctttaaccattattttgcagaattacagagcctgggtaaaggtgaacttcatcagcccttaagattgacatacacactagaatacattttgaccttccttttgaattaattcagtagattttcatgtgtatttaaattgttaatacattgttggttacaaatattatatgtacaccaatatctaaactttgtgaattttctgtgtattattcattgttatataatgattgaaaaatatcctttgtacccttccaagaactgtgttatatgaaacgtacatttcttcggttagccccacagtgggggtgggctttgaagtctcatatatgctcaagccatgcccatgtcatagacaacttcctgttgcctgaaagatgtaagagtctgagctacttttccagcaccatgtctacctgcacactgccatgtcccacaatgatgataatggactgaacctatggattgtagttgagccacctttagaaatttgcattatattgttaaatgaactatataggtacaataccttaacaagattagaaacatgtacaatatgtcttaacatattaatcccaaatttgtatcaatatacaacatttgtatataatatacagaagtccaatccaatgtataatatttaaaactggggtgatatcttgcttgtataaataaagcctgtctgaaagtcagagaatggagcttgtcactagctaaccatagaggtctggaggtctatacagacagacaggaagtgaggcacctgggcagaagcaggatataaggagggagaaacaggaactcactctcttatctgctgaaatgttaaggaggtaaggtgtggtggtggttttctccttctctctgatcggtcaacattttcctctatatctgactctgggtttttattacttagaccaattaagttggtctaagtaatctcagggtcatgggtttgtgctccatgttgggcaccaaaatataaatggagttcttttttattattattatttttaatttttaagttcaaattagaaacaagcctgcatcacatgtcaatcccagctccctctccctccggtcctcccccaccccccacaaaccctcctccccatctctccttggctccacagagagagtaaggccctccatgggggatccccaaagtatgtcatatcatccagggcagggtctaggccctccccatgtgtccaggctgagagagcatccctccacatgggatgggctcccaaagtccattcatacaccagggataaatactgatctactaccagaggccccatagagtgccaaggcctcctcactgtttcaccagcccagttttgacctctttgcccatcactcctacctctctgaaactgggttccagaattcagttcagtgtttagctgtgggtgtctgcctctgcttccatcagccactagatgaaggctctaggatggcatatacggtagtcatcaatctcattatcagggaaggacatttaaggtagcctctccactactgcttaggttgacagttggtgtcaacattgtagatctctgcaaatcttcctagtgccagatctctcctcgaacctataatggctccctctattatggtatctctcatcctgctctcctgtattcttccccgactcaaccttcccatttcctcctctcccctcctcttctccccctttctttctcccagctccctctcccctacccccatgctcccaattacctcaggagatcctgtctccttccccttctctgggggaccatgcattcttctcttggagtcctccttgtttcctagttcttctgccagtgtggattgtaggctggtatggattttagacatagagcaaatggagttcttaattggtctaagttagaaaacagtccaaagctcaaaatttcctcacacaatctcttaactataagcccctgcaaaatcaaaatgaaaaagcagattgcatacttccaacatacagttgcacaggatacacattatcattcaaaaagggagcaaaggagacacagtgaggaaatactaaaccaaaacaggcctaaaagccatctggacagactgtaaactctgcattgccatgtctgatgtacaaatgcttttcagatctctaactctgttcattgttgttgactgtaacccacttctttctcttggatcagttccattctctgttagcagctttccttggcaagtattccatggctctggcatctcaaacattttggggtctccaaagcaagccaagattcacttttacagcttcacacaatggcctctataggtctccatgcagggacacccctgacacgtgcctggtttcagcagctttccttagatgtggagagagattacataacccctttcttctatccttgacactaaagccagaactatgtggctgcttgctaggtttggaacatggtccacttgtgcaaatacatcttcacttgctttctgtttttgatgatttcctttactgcttgagcttggctgtcctggaacttgtagtgtagaccaggctggtttgaattctgaaatctatatgtctctgtctccccactgatgggattaaaggcatgcactaacacacctttccttaagctttactttaattcctttttctggaggccattattacaaggataacaattgatattcaaggtgtcaacccactagaaaataatttctgatggagggaaattcatgtttcaaagcctgcaatatatacagactccagaatatctgttacttttgcctgtaattttacacatgttggattgcattcttccctagttgctatggggaatttcccacagcctgtatataatttgtgtgtatctcatgaatacattcctgatctactggacatttttatttgtggattgtcaagaaggtggcgctttcttagctgtattgtccaagaaatattaataatgttagtgtatgtagcattctgatgaataaaataaatacaaaaagatgctacccaaatcaggagttataagttcccatcaagagaatgaaacacatttcctccaataaggctacatctaccccaataaagccacacctcctaataatgccactcactatgggcctctggggtacattttttattaaaactgccacagggtgatcggtgtttggaacccactgccacagcggaactgggtctggcaggcaggttgcttgcctcagatgactctgtgcagcgatgacaaactggaactggaaacagttcctggcctacctgggccggcagatggaggccagactgcctctgggtgttcggtgtttggaacccactgcccctgctgaactctggtttgttttttcttccatttctttaagggatttttctcatatcctctttgaggccctctatcattttcatgaagatgtgtttaaggacatttttttctgtttcatctgcattgtgatgttcaggtcttgctggtgtaggatccctaacctctggggttgtcatattggtttttctgttgttgaatgtgcttttatattgtcttcttcccatcttttcttccagtgggtgtagcaggagtctcttcctctcctggtgggtaggggaccaaggctcccttctggtagatacaaacagttccaatactctgatgtctgtcctcttctcatggatggaggtaagactggtactgggaccttggcagtctctgtgtgttggatcctgaagaaatgggatctcttgagcagaccctccccccacctcaggtgtccccagcagggcagcagaacccggaccatacaggagatgtggtcttattagaggaggtatgccctttttaggaagtgtgtcactgagggtaggctttgaggtttcagatgctcaagcaagacccagtgtcactctttctcactactgtctgtggatccaaatgtagaactctaaggtatctctccagtaccatgtcttcctgaaccaggatgataatggtctgaaccataagccaatcccaattaaatgttttcctttatacaagttgctgcagtcatgatgtctgtctcttcacaacaatagaaaccctaaataagaaagtttcataaataattgtatgtctaattagatattaaacacatgattattatgttaaattatgataaataaatcgctgttttggcaaaccctaaatgattgtgtgtaattgtgattgaggcaagacttttgtttcagaagtggatcaacgctctttgatatagaagttcattattgttttcaaaaagacatttctcccaaaggcactaaaatattaccaaagataaagaatatctatcttttgctaggatataaagctgttaattcaccaaaaatatataacacttatgaaatgtatacagctaacaaaagagactccagatgcatgagacaaaggctgtggagctaaaaggaataacaacaataatagcacacaggatattaaagattccaacactcttctttcagtcattgtacatctctggaaaacctgaacacctgaacaatactgtgatcaataaaaactatctgacatcttaaaaatagtcttaattttctggagagatgactcaggggttaacagcatttgttcctcttccataagggcagactcagccaaatagagtggaccacaaaagaaagttccctcttcacatgattaaaacaccagaataaagaaaaaaatattaagagcagcaagggtttaaaaggccaagtaacataaaaaggcaaacctatcagaattacaccagacttctccatggaaactctgaaagccagaaggacctgggtagatattctaccaaccctgagagaacacagatgccagcccagactactatacccagcaaagctttcaatcaccataaatggagaacaagatattccatgacaaaaccagatttaaacaatatgtaaccactaatccagccctacagaaagtactggaaggaaaactccaacctaaggaaattcgctacactcacataaacataggcaatagataatcccattctacaaaaacacaaaataaaaggcagggtaaatccacatacaataccagtaccaacaacaaatcaaaaacaaacaagaataaacactcaatggaccttaattttcctcaatattaatggtcttaactcacttataaaaagacacaggctaacagattggacacgaagacagaaaccatccttctgctgcatacaagaaacacacctcgaattcaaagaccaacattacctcagagtaaagggttgggataagatattccaatcaaatggacccaagaagcatgctggggtagctatcctagtatctaacaagttagacttcaaactaaaatcaatcaaaagagatgaagaaggtcatttcatattcatcacaggaaaaatccaccaggaagaagtctcaattctaaacatctatgccccaaatacaaaggtaccaacattcgtaaaagaaacattattaaaactcaaattacaaataagacctcaaacagttatagtgggagacttcaacaccccactctcaccactggacaggaacaccagccagaaacttaacaaagagacaaagaaactaacaaaagttatgacccaattgggattaacagacatctatagaactttctatccaaacacaaaagaatataccttcatttcagcatcatatggaaccttctcaaaaatcgaccacatactcaccaatgtagcaaacatcaacaggtacaaaaaaattggaataatcccctgtgtcttatcagaccaccatgttttaaagttagaaatcaaaaacaaaacaaactgcagaaaacctacaaactcatggaaattgaacaacatgcaattgcaccattcctgggtcaacgaagaaagaaattaaagacttcctagaattcaatgaaaatgtagacacaacatacccaaacttatgggacactttgaaagcagtgctaagaggaaagttcatagctctaagtgttcaaatgaagaaactagagaatagccacaccagaaagttgacatcataggtaaaagctctagaacaaatggaagcaaattcaccccggaggaacagacaccaggaaataatcaaactgaaggcagaaatcaataaagtggaaacaaagaaaacaattcaaaaaatcaatataacaaagagattggttcttcaagaaaatcaacaagatagacaagccattatccaaactaaccaaaaggcagagagataacatgcaaattaacaaaatcagaaatgaaaagggggacataacaatggacactgaggaaatccagagagtcttcaggtcatactttgaaaacctttaatccacaaaatttgaaaatttaaaggaaatggacaattttctgaacagatatcacttaccaaatttgaatcaagaacagataagcaacttaaacagacctataacctctaaggaaatagaagcagtcatcaaaatctccctaccaaaaaaagcccggggccacatggattcactgcagaattctaccagaaattcaaagagctaataccaatactccttaaattgtttcacacaatagaagcagaagggacactgccaaactctttttagcaggctgcaataacctcgatacctagccacacaaagacacaactaagaaagagaactacagaccaatatccctcatgaacattgatgtaaaaattctcaataaaatattggcaaattgaatccaagaacacatcagagaaatcatccaccatgataaagtaggattcatcccaggaatgcaaggatggttcaacatatgaaaatccatcaatgtaatctaccatataaacagactgaggaaaaaccacatgatcatctcactagatgccaaaaaagcctttgaaaatccaacaccccttcatgataaaggccttggagaaatcagggataacaggaacatacctcaacataacaaaagcaatatacagcaagccaacagccaacatcaaattaaatggagagaaactcaatccagttcctctaaaatcggggacaaggctgtccactgtctccataccacttcaatattgtccttgaagttctagctagagcaataagacaacaaaaggagatcaaggggatacaaattggaaaggaacaagtcacattttcactatttgtagatgatatgatagtttacatgaatgaccggaaaaactgaaccagagaactcctacagctgataaacaccttcagcaaagtggcaggatacaagattaactcaaaaaaatctgtagccctactatatattgtaggggaagctgtagccatgcctactttggggctggctacaggtgtgcctgatcacgcttgtgagggcgtggtcagagtgatgtagtgtgactgcgtttgtgctttcggtttctctttgcttcttgctgtacaggctactgccacgccatctggctaggtcgctctgtaagtaaggcttttccctattaaatacccttatatttctacctgactccgtattggtaatttcccactataatatatgaatgacacattggtggagaaaaaaatcacagaagcatcaccctttacaattgccacaaacaacataaaataccttggagtaacactaaccaaaaaagtgaaagacctgtaccataagaattttgagtctctaaagaaagaaataaaagaagataccagaaaatggaaagatcccccatgctcttggatagttaggatcaacagagtaaaaatggcaatcttgcccaaagcaatctacagagtcaatgcaatcccatcaaaatcccaacacatttcttcactgaccttgaaagaacaattctcaactttatatggagaaacaaaagacccaggaaagccaaaacaaccctgtgcaataaaggaacttctggaggcatcaccatccctgacttctagctctattacaggctatagtcctgaaaacagcttggtattggcacaaaaatagacaggtagaccaatggaatagagttgaaaaccctgattttcacccacacacgtacgaacacctgatttttgataaacaatccaaatttataggatgcaacaaagagaacatcttcaacaaatggtgctggcataactggttgcagacatgtagaagacggcagttagacccaagcctatcaccttgcacaaaacttaagtgaaaatgatcaaagacctcaacataaatccagctacactgaacttattagaaaacaaactgggaaatacacttgaattaattggtataggagactgcttcctgaacattacaccaatagcacagacactgtgtcaacaattgataaatgggacctcctgaaactgagaagcttctgtaaagcaaaggacacagtcagcaagacaaaaccgcagaccacagactgggaatgatattcaccaaccccacatctgactgagggctgatatccaaaatatacaaagaactcaagaagctagtctctaaaacaccaaacaatccaattaaaaagtggggtacagaactaaatagacaattctcattagagtaatctaaaatggctgaaaaacaaataagaaagagttcaacatccttagccttcagggaaatgcaaatcaaaacaactctgagataccatcttactcttgtcagaatggccaaaatcaaaaacaccaatgacagttcatgctggagaggatgtggagaaaggggaacacttctccactcctggtggtagtgacaacttgtacagccttttggaaatcagtatggtgagtcctcaagaaaatgggaatcagtctaccacaagatccagcaattccactcctaggcatacacccaaaagaagcacattcttacaactaggacatctgtttaatgatgttcatagcagcactatttgtaatagccagaaactggaagcagcctacatgcccctcatctgaagaatggatagagaaaatgtggtacttttacacaatggagtactactcaacgggaaaaaaaaaaacaatggaatcttgaaatttgtaggaaaatggatggaactagaagaaaccattctgagagaggtaacccaatcacaaaagacaaacatggtatgtactcactcatatgcggattttagacagagtaaagcattaccagcctacaatccactctgccaaagaagctaataaacaaggaggaccctaagagagacatacatggtcccttggagaagtggaaagggtcaagatctcctaagcaaattgggagcataggaagaggggggggggagcaaggagaatgagaatgggagaagaggagggacatgagggagcagaaaggttgagtcaggggaagaatagatgttaacaagaatggagataccataatagagggagacattttaggtttacagagaaatcaggcactagggaaatgtctggagatctacaaagatgacaccagctaacaatctaagcaacagaggagaggctaccttaaatgccctcccctgataatgagattgatgactaacttatatgccacccgatagccctcatccagcagctggtggaagtagaagcagacacccacaactactcactgaactgaactggaacccagatgcagagaaggacgagtgaagagcacaggagtccagaccaggctggtgaaacccagaggaatagctgacctgaacatctgggaactcttgctccccagactgatagctgggataccagcatgggactgatccagaccccaggaacataggtttctgtgaggaaacctcggaaatctatgggacctcctgtagaagttcagtacttatccctagcataggtgtggactttgggagcccattccatatagagaaatactccctgagccaagacacactggggtggacctaggccctatcccaaaggatacaatagactctgatgacactctatggaaggcctcaccatccagggggaacagaaaggatatgtgatggatagggttttagttggggggggggtggtaggagaggacgattgggagaagagtactgggattgtcatataaaacaatcctgtttctaattcaaataaaaaagttgaaaaaaataattcactctagagagaagccatacatatgtaaccatgtataaaagcctttagtagtcatagctcctattatatgcataaaataattttacactggtgaaaaattcttatttagaataaatgtggagaatgatttatagtgtttaatagccttgtgtaacctgactttccctggacttccagacctcaactaatgacatggagatttatttttaattgtgaaatcttggacttagttgttcccaaacagttcttatgattttaattcacctgtttatattaatctaaattcttccatgtggcttattacctctgctcagtaacttgcatcccactgcatcactgtctggctggcaaatccatgtctcccagattcttcccacaagttcctttcttgccccagaagtcctgtctatcctctccttcctagctattggctgttcagctctttattaaaccaatcagaaggggctttgacagagatacattttcatagtgtacaaaaagattatcccacaacatttcctcatttttgactaaacaaaaagaaatgtttcaactttaatattgtaaaattatatataataagagctattatggttaaggattacatccatgttcacttcatttgtatttcccaaattctaagaatgtactctattatcaatcttttcttgatgagtccaaagttttatacctaatccattttctatcataactcaccctaccagcctaaaaatatcctatgagaccttttaaacattttcttagataaacaactttagctctcaactttataaactttataaactttacatctcttttgtaaatttcttctctgaatttagtaacaagaaaaaaccttaagactataactaattcagtatctatttccatcagagacccaaagaggataaaatattacccaagtaaacagaaagcacagagctagcaatttataaaactataaaaatgacagagacagctggctgcctggacagccacccaaggttcttctgtagagttgggcatgcatctttggcctacaggcctgaatatctggctgatttttctgtgaagcagaaattttgaaggattggcctaccttgttttagcaaggttgacagttgactttctttgtgacctgcttgtccagtttgaacagcatacttccaacatttgaggcaagggcagtttcttgcccagtgtctagctttgctgcatttgaagcaaacactatatagaggttctttgatgcctgtcatcatctctaaagtggattggtgcctacaggagcagacatatctcactgtcatgaaaagcattaggttattaaaacattttaaatgtcatattctgtagctctctgaagtgtttgtacactagctgtctatctaaaatatatctgtttaaccttgaaaacatgcctaacatgactgcaagtttgattgttatagatgactaactacaaacctgcattaagtatcctaaacactttgtaataatagctctcacgggctcgaacttcattacattgttaaatgagcttcataggtacaataccttaaacaatagtaaaaacatatatacagtatgttatagcaaaacaaccttaagtttgtatcaatatacaaaattacataccaatgtaaaatatttgagactactagttgctttttagtttaaaagtggattcagtaatctaccattttattctatcatttctacaccctcctttactagataggagagaaagaaggatagaggaaagaaagaaaaatcctttaacccaatctcctttgtttagtttcctccctgaccatgaccaataacaacttgcaactaacctagaaaacaattttaaacttccataacccaatgaatgacaaaacaacaaccaccccacctcttgggaaagtgggcattgtattctcccccgaccccacactaccacacacccttttttttaatttaaattagaaacaagcttgttttccatgtcaatcccagttccctttccctcccctcctcctgagtgaggtaacccattcacaaaaagacaaacatggtatgtactcactcatatgtggattttagacataaagcaaaggattaccagcctacaatccacaccgccagagaagctaggaagcaagggggtctctaagagagagatacatggtaccccagaaaaggggaaagggacaagatctcctgagctaattgggagcatgggggaggggagaggaaggtaggagaaaagagaaggggaaaagaagatgggagaggaggatatgagggagcaagaagatggagtcaggggaagaatagaggagagcaagaaaagagataccatattaaagggaggcactataggtttaaagagaaatctggcactagggcaatgtccagagatctacaaggatggccacaactaactatctaagcaatagtggagaggctaccttaaatgcccttctccaataatgagattggtgactcccttatatgccatctagagccttcatccagtagctgatggaagtagaagcagacacccacagctaaactgccggggtccgaaaaatatagattataaaatttgggatccaaacctccactctatgtccaggagcctgaatctcccattgtctttcagatgtccagataattactatggcttggcctcagtggagaatgtctccgagtttacataacaacagacctaggccctgggtatgtctgatcctgttctgagttgcctgtttatgtatgtacctagggactgtttagatgtgctgctagggttttttgtgtgtgtttttgtttttgtttgtttgttttttgtttgtttgtttgtttttcgagacaaggtttctctgtgtagctttggagcctatcccgcctggcacttgctctatagtccaaagtgtcctcgaactcatatggatccacctggctctgcctcccgagtgctgggattaaaggtgtgcaccaccaatgaccagccaatgctggtagggttaaaagaattttctgatattagctttatacatgatagtagatgccttctgcagtcactcccactgtgggaaagctatttaagaggatgctaaaataaactggagactccagtttccagcatggactgagagagctcctgaaacaacaagatgtccgtgtctcatctttattgccattgggtagctaggagtttcctggtccagcatcccgccgcccccctcagagatcgacttggggccatttggctggctccgatttcagccccaaagacttcagtctggaatagatagcctctgtatcgtgggactgatacaagctgggccctggcaaaatggcacccaaaatgtggaacctgagatggggaagaagtgatggacaccgcagtgagatggacactgcagagaaatggacaccatagaggagtagacactgcagagagacagacaccatagatataagagtctgagaagaagcacgtgcagaaaaaagaaaaaagtcaggtgtggtgagtgaacagcattaagtcaggagtaaaactgtatataattgttgaaataggaaacagataattgtaatataaaacaggaagatattagtccgttgacaaagaagtaaagtgggttagttaaccctaaaagtgaaaatgtgcacaagtatagatatgagacagagaaatgtcagtcagatgataaagaagtataatgtcatgagttagactccagagtaaaaaatgcagataattgtagatatgaaacagaggaatattaaccagatgataaagagaagtaagttagccttgagagcaaaaatgtatatagatatataagacagagaattattagtcagatgattgtatatttacttgggtatattttaatagccaggagagctgacactgctatgttacaagagatctcaactaaggatttttcatttcaacaaactggtcataacctaggcaaaaggagagatgagagatgcatgtatgtatgtgtggtctatgtgtgtggtatggccataccagtattcgtgaaatattattgtgaatgcgtgaatattgacaaaagtaactgcttaaattggcttgggtatgactaaagagacatttacattgcctcgtatatagtaaaaaaaaaaactacctaaatttctttaaatatggttaaagagagcatccaatcagtcagtctatgacttaacaaaaaaggttggcaatttgagccctcagagccagttgatggaaaaataacagaagcctacagcactgacttaagagcaaaagaaatctatgtggatgattctatagagtttagcagaggagaggatataaaaatcctcctaaatttttatggttaaaaaagtagacgttaacacatgatttgaaaaaagatttttgagaaaaagccccgagacagcctccctgttataccctccatctggaatggtgtcaatgtagatgcaaatgaggccttgtcagctagtgagagcttcacaatttggattagaaaagaatagtcagagacttcaagtaattttcaaaaattggcttcctcccccctccgcctccctgacttctcctgagccctcctcgtccccaaggtctccatcatcctaggatctctctgggcctgcggcttcagagagtggtcttgccttcatagtgtggacccacccagacaggaaggtcctccgtgagtctggaaatacctcactctcccttccccctctgccatcccaaactctcctgagtgaggagactaccaggagaggcaagaacatccatatgtgcagacattgaggtcttagcccacacacaccaccgggtgacaagaggacatagagagaccccacctgcacccactggaagaagagatgggaagaaggcagaataagaacacactcaacagaaagaccaatatgacaccaccagattctagggactccacactagcaagatctgaaaagcacaacacagaggaagaagaagagacagacctaaaaatctacttcatgaagatgttcgagacccttaaagaggagacgagaaaatctcttaaagaaatagaagaaaaaacaaacaaaaaattcaagaaataagtaattctcttaaagaatctaaagaaaaaaacaaccaaacaaatgaaggaagcactggaaacagttcaaggcatgaaagctgaaatagaaacaataaagaaaacgcagaatgagggattgctggaaatacaaaggctggataaatggtcaggatctaaggatgtgagtataatcaatagaatacaagagatggaaaggagaatctcagttggtggagactcgctagaggatatacagtcatcgaccaaggaaaatctcaagtccaacaaatctctaacacacaatatccagggaatatgggacaccgtgaaaaggccaaacctaagaataataggtatagaagaaggtgaagaaatacaggtcaaaggtacacaaaacatattctacaaaatcatagaataaaacttcctcaacctacagaaggatatgcctatgaatgtacaagaagcttacagaacaccaaatagattggaccacaaaaagaactcccctcgacacataataatcaaaacaccaaacttacagaataaagagaaaatattaagagcagcaaaggaaaaagttcaagtaacatataaaggcagacctatcagaatcacacctgactcctcaatggaaactttgaaagccagaaggtcctggacaggtgtcctacaaacaccaagggaacatggatgacaacccagactactgtaacccagcaaagctttcagtcactatagatggagaaaacaagatattccatgacaaaaccagacttaaacaatacatatccacaaatccagcactacagaaagtcctagagagaaaactccaacccaatgaagataactatactcacacaagcataggtaatagataatccaactttaccgaacaggaaaagaaacaggagggagaaatacacacacaatgacaccaccacaaatccaaacaaacaaaaaccaacaatcaatggacattaatatccctcagtgtcaatggtcttaacctgcctataaaaagatacaggttaacagaatggatacgaagacagaatccaaccttctgctgtatacaagaaacacacctcaacttcaaagacaggcattacctcagagtaaagggttgggaaaagattttccaatcaaatgggctcaagaaacaagctggtgtagcaatcctaatatctaacaaattagacttcaaagtaaaatcaatcaaaagagatgagtaagggcatttcatacttatcacaggaaaagtccttcaagatgaagcctcaatcctgaaaatgtatgccccaaatatgaagacacccacatttctaaaagaaacattgctaaagctcaaaccacacataaaaccacacacatttgtagtaggagacttcaaaatcccactttcaccactagacaggaccaccagccagaaacttaacaaagaaacaaaggatctaacacaagttatgacccaattgggtttaacagatatctatagaacatttcttctgaacacaaaagaatataccttcttctcagcatcacatggcaccttctctaaaattgaccacatagatggcaacaaagcaaacatccacagatacaaaagaattgaaataaccatctgtatcttatcagatcaccatgctttaaatctagaattcaacagcaatacaaattgcagaaaacctacaaactcatggaagttgaataacacccaattgcaccattcttgggttgaggaagaaattaaagacttcctagaatttaataagaatgtagacacaacatacccaaacttacaggacactttgaaagcagtactaagaggaaagttcatagcactaagtgcccacatgaagaaactggagaatagtcacacaagagaattgacagaacaactgaaagttttagagcaaaaagaagcaaactcaccacagaggagtagatgccaggaaataatcaaactgaggtctgaaatcaataaagtagaaactaggagaacattacaaagaatcaatgaacaagtaaaggctgtccactctctccatatcgcttcaatattgtacttgaagttctagctagagcaatagacaagaaaaggagatcaaagggatacaaattggaaaggaagaagtcaaactttcactaagtgcaaatgatatgatagtctacattagtgaccggaaaaactctactagggttctttgagaagatcaacaagatagacaaacctctatccaaactaaccaaaaggcagagaaagagcatgctaattaacaaaatcagaaacaaaaaggggagatataacaattgaaacagaggaaatgcagagaatcatcaagtcatactttgaaaacctgtactccacaaaattcgaaaatctaaaggaaatggacaattttctgggtagatatcacttaccaaaattaaaccaagaaccgataagcagtttaaatcgacctataacccctaatgaaatagaagcagtcatcaaaagcccaccatccaaaaaaagcccagggcctgatggcttcactgcagaattctacacaaagatacaactaaaaaagagaactacagacctttatccctaatgaatatcgatgcaaatatactcaacaaaatattagggaatcaaatccaagaacacatcagaaaactcatccactatgatcaagtaggcttcatcccagggatgcaaggatggtttaacatcagaaaatccatcaatgtaatccatgatataaacaaactgaaaaaaaaacgcatgatcatctcactagatgctgaaaaagcctttgataaaatccaacatccattcatgataaagatcttggagagaacaggaataacaggaacatatctaaacatgataaaagcaatatacagcaagctgacagccaacatcaatggagagaaactcaaagccattcctctaaaatcaggaacaagtaaaggctgtccactctctccatatcgcttcaatattgtacttgaagttctagctagagcaatagacaagaaaaggagatcaaagggatacaaattggaaaggaagaagtcaaactttcactaagtgcaaatgatatgatagtctacattagtgaccggaaaaactctactagggtactcctatagctgataaacagtttcagcaaagtagcaggatacaaaattaaccccaaaaaatcagtagctctattatatccagatgataaatccaatgagaaagaaatcagagaaacatcaccctttacaatatccacaagcaacataaaatatcttgggataacgctaaccaaaaaagtgaaagacctgtacagtaagaactttcagtctttaaagaaagaaattaaagaagataccagaaaatggaaagatctcccatgctcttggataggtagaatcaacatagtaaaaatggcaatcttgccaaaagtaagctacagattcagcacaatcccatcaaaatcccaacacagttcttcacagaccttgaaagaacaatactcaactttatatggaaaaacaaaaaacccaggatagccaaaacaactctgcacaataaaggatcttcgggaggcatcaccatccctgacttcaagctctattatagagccatagttctgaaaacagcttggtactggcacaaaaatagacagacctatggaatagaatttaaaaccctgatattaaaccacacacctatgaacatcttatttttgacaaagatgctaaatctatacaatggaagaaagaaaccatcttcaacaaatggtgctggcacaactggattcggacatgcagaagattgcagatagatccatacctgtcaccatgcacgaaacttaagtgcaaatggatcaaagatctccccataaatccagccacactgaatcttctagaagagaaagtgggagatacccttgaatgaattggcacaggagacagcttcctgaacattacaccagtagcacagacattgagatctgcaattaataaataggacctcctgaaatggagaagcttctgtaaggcaaaggacacagtcagtaagacaaaacgaccacccacagaatgggaaaagatcttcatcaaccccacttctgacagaaggctgatttccaaaatatacaatgaactcaagaagctagccaccaaaacatcaaacaatgaaattaaaaaatggggtgcagaactgaatagaaaattctcaacagaggaatctgaaacagctgaaagacacttaagaaagtgttcaacatccttagccatcagggaaacacaaattaaaacaactctgagataccatctcacaccggacagaatggctaaattcaaaaacaccaatgacaatctatgctggagaggatgggaagaaagaggaacactcctccattgctagtgggaatgcaaacttgtaagaccactttggaaatcattatggcggttgctcagaaaaatgggaatcagcctacctcaggatccagcaattcttctcttgggcatatacccaaataatgcacattcataccacaaggacgtatgttcaaccatgttcatagcagcattgtttgtattagctagaatcttgaggccacctagatgtccctcaactgaagaatagatagagaaaatgtggtacatttatacaatggagtactactcaacagaaaatagcaacggaatcttgaaattcgcaggcaaatgaatggaagtagaaaaaaaacatctggagtgaggtaacccagtcacaaaatacaaacatggtgtgtactcactcatatatgaattttagacatagagcaaaggattaccagtctacaatcctcttcaccaaagaaactaggaaacaagaaggattgtaaaaaaaaaaaaaaaatgcatggaccccagataatgggaaggggcaggatctcatgagctaattggctaattgggagcatgagggtaggggacagggagctgccagaatgagaacaggagaagaggaggggagaggaggaaatggaggaccaggaatgttgagttgggggaagaatagaggagagcgggatgagagttaccatatcagaaggagccattctaggtccgaggagagatctctcactagggagatttccagagatttacaaggatggcatgaactgacaatctaggcaatggtggagaggatcacctaaatgcccttcccctataatgagactgatgactacttttttatgccatcctagagccctcatccagtggctgatggaagcagaggcaaacatccacagatatacactgaactgaactctggaacctagttgcagagagggaggaatgaagatcaaaaggatcggtaccaagctggtgaaaccacagaatcagctggcctgaacaagggggagcactaatattgtaatgtttggcaagttaaaatatatgcacatggcaattgatagatattcaggttcctaaacatgtgataagtcattgtttaaaatgttttgtttacatgggagtaccaaaagtaatataaacagacagtagatctggatattatagtaaggcatttcagttattttgtactcaatggaaaaatgatcgaaaaacagatattccttataatcctccaggacaaggaattgtggagcatgctcatagctcctggaaaacacagctttaaagaattaagaagggggagaaatgtcccagtccccacacgatgcattaaatcatgcactcttcattttaaattttttaaatgtggatgccagtgagcaatctgctgcagacagattctggcataacagaactcgagcgaatttcgctcaggtcaaagggagacatccatgcaccagataacggtgaggccagacccggttaatagtctggggtcaagggcatgtttgtgttttcttgtaggaggagaacaaggtgtgttggctgccagaaaggttggtgagatgcgtggagcagagaaaaaccggacccgactctgaatcagcttgagtgaaacccgatgaaccagtgttcctgacccctgatgacatccgatctacagcctgaggaggaaaggagacacccagttccagagttccagtttctcaacaggccagctacatctacctccccagacccatgagttctcatcccagagccgacaaagaactgaaggactaacagcttgccttttgccacaacttgaaacactgaacttttttgccagtttttcccattggagaaaaacgacccatttagaacaattggacactagtataatccatgatgagtggcaaaaccccctcctcagtgtttgaacgagacatggataaaaagttttgcggtttacattcaaggactgtgatattacaaacccgatttcggaattttacagacaacaaagcattgaattttagacaagaaaaagaaagattgacagaactttgaactctagataggtaaaagaaaaagattcacagggcattgaactctagacagggaaaaggggggaaagtttagaattgtggaattgttcacactccacacatcttaagaacattttattgtcttttgatttcattgttactcatcccaatgtatgttcatatgaaattgttaatgttcataacctttgctgtatgtgctatgcaaatgtttatggaaacaagaagtcagagctcattctaacaggaacgtaacatgtgacttataggtcttagggtaaaagtgtgtttagaagggcaaactagaggtcttgtcattaccagaggtactggagacattcccaggctggtttgaaaaggccattttaactctgtccatttctgctcccccttttttgcaggagattctttgcagccatgaaagcatagatgttgcttccatggtaagctcccaggttgagaggcatatggcattggaccatgctgcatcccccttaatgttctttgttacagaggctagatttagccagagatgggaaaggttgttttttgtttgtttgtttttgttgttgtttatttgttttgttttctgcctccaggaaacctaatgcagaacacgcatgatgcaatgtctgatttgatgacaggtaactctggtaggttgaagaaagccacctaagccaggcacagtcctgtgtcctgttgcagaagcacaggtatcatcttaataatttaagaggggggaattgtcggggaccgaaaaatacaagttataaagtttggggtccaaatctccactctatgtccaggagcctgaatctcccattgtctttcagatgcccggctaaatacaaccagatggcttggcctcagtggagaatgtcttctagtttacataacagcagacctaggccctgggtgtgcccgaatctgttctgaccttcttgtttatgtgcctagggactgttcaggtgtggagctagggttaaaagaattttctgatatcagctttatacatgatagtagatgccttctgcagtcgccctcactgtgggaaagctatttaaaaggatgcttgaataaactggagactccagtttccagcacggactgagagtcctcctgaaatgacaagatgtctgtgtctcattttcattgccattgggtagctagaagtttactggtcgcccccccacacacacatcccagcgactcagggatgaacctggggccattcggctgactccaatttcagccccaaagacttcagtctggaatataggactgataaaagccaggccccagcactaaacattgagctgaactcctggaatccagttacacagatggaggagtgatgagcaaatgggtcaagatcaggctggagaaacccacagaacagctgacatgaacaagggggaactcatggaccacagactgatagctgggaaaccagcataggactgatccagacaccctgaacatggatgtcagtttggaggtctgggcaatctatggggcgtctggtagtgggtcagtatttatccctaatatacgaatggactttgggagcccactccacatatagggatactctctcatcctagacacatgggggagagtataggccctgctccaaatgatatgacagagtttgaaaatccctcatggaaagcctcaccctccctggggagcagaaaggggatgggataggggggtctatagggggcaggggaggagggcaacactatctttaggagattctgagaaaattgggaaaattgtcaagttctgggagggctagctgcatcattttttgtctagttactgtgtaatagaaaagtgcagggcttaactgaagtcctgggtagagtagtgtctatggctagaccctctcatctagcagctttgcagttgtcctgagcattttgtagtccgaaactgttcttgggtggcactcgtcaacttaatggcattaccacagtccaggtggacttgtcattgtaaggcgccatcatctttttggagacctccaaagtcgctcttaggaatggtcatgtttcactttagaaaacttcaacttttaaatgtcatatatgcagttttctgaaaggttagaggaccgcaatatattaagtacacctgggatacacaagcttagttcctaattatctgctttagactcaaacccaaaaacacatactggaaagtagatgaagtttctttctaaaactgtgtgattactaatgtctcaaacagaaagcttacatatacacataataatcttatagattttgagataatacttatatataaagaaaagttttaaagagccaaaataaaaccaaatgattatgagattaatggcaataaaacagtttcttggttttggttttcttgtgtcccatgtagatggcttttatgacatgagatggggatttggacacaagcatgcttagtgttagagaagcagagagccatgttaaaactccaaagtcaacttgaatttatagttgaatttggaccacaaaaagaccatttgctttttacattcatagagagcagcaaaaacaagcatttgtgaagatttatgaaattctaccctattggaggtgggctgaaccattaggccaatttactctttttcttgagacattttcttaatgattcatcctttttcttcagatgtctcatttgtccagtgatctctggattcctttgttggatgtttttattctcctgaaaagacaaaagcaaaaccctgctccaactctaactttggggagtttccttttttttttttttcatacctgagaaaatgaaaatcatttgttagtcttattataagccagtttgaattcggtggccaagctgtttgatgaactattgcctgtctttcatcaggaggcttctcatgctcaaatctaaccttttcagtctttatggtatccatggattttcttctactgaggaaataaaagcaaaagctcttccccaatataacacatatcttggtttccattctgaggtctgaacatctttaaattatacaggttgatttgactcaattttttctactatccaatgtctctctgcagatgttgttcctttctcattatcatttaaaagttttaaagttaaagcattgtataatctatccctgggggcaggttattgcctctttctgtttattaagcatgtcttttgaagtgtgtaggattgtgtggtatacctgtaatatgtattatgttgtattatgtaaaaaaatgtttcattttattagagacatatgctggaacattttcagtcttaatttgtacaggtatctccataattactatgatgtctaaaaatgtgtaattacagaatcagcttctcagaacttaaagtagctgcccattaaaatcctgaatatatgtctatggtatggtacacatactttaatttcccaaactctacaaaatgaaacacatccatttaccaaatttcatttctttgaatacctttttggtttactttctgcaagtaattaaattttgttataaaagaacaagtagtagatttccttataatttccttggtttgtcaccaagtgacagaaaaaaatctttcttcaagtctttgctgttaccatggtgattcctttgaaattctgaggctttttagcacatttttgtatttccattatggagtcttcctaaggcttgtatcttttcagtcaaattttcatatttgggacagttacttagctacattttaaggatgaaatatgaattatcaaactgatcataattacaatcaacattatgtcaatcccagctacgtcaattatcccttcatttgtttttcccatttccaagttatcaatagttgcactatacagagtcctaattccctgcattatgatattccccacttatagtatgagaaagatttttctttttagtgttacttaactttcttcttaagaatttcccagatgaatcagtctaccacaagatccagcaattccactcttaggcatatacccaaaagatgcacattcatacaacaaggacatctgttcaaccatgatcatagcagcattatttgcaatagccaggaactgaaagcaatctagatgcccctcaactgaagaatggatagagaaaatgtggtacatttgcataatggtgtactactcaacagaaaaaaaaatggaatcttaaaatttgcaggcaaatggatggaactagaagaaaccattcttagcaatgtaacccagtcacaaaaagacaaacatagtatgtactcactcatatatggattttagatctagagcaaagaagtagcagcttactatccacacctccagagaagctagaaaacaaggaggaccctaagagaaacatatgtggtctcccaaaaaaggggaaatgaacaagatctcctgagaaaattgggagcatggtggcaggggagagggaactaggagaatgagaagaggagagaggaggacatgaagggccagaaaggttgagtcaggggaagaatagaggagagcaagatgagagataccataatagagggagccataatagatttacagagaaatctggcactagggaaatgtccagaaatctacaaggatgacaccaactaacaatctaagcaacagtggtgaggctaccttaaatgccctcccctgataattagattgatgactacctaatatgccatcctagagccttcctgcagtagttgatagaagcagaagcagatagccacagctaaatactgagcagaactcctggaatccagttgcagagagagaagagtgatgatgagcaaagaggtcaagaccaggttggtgaaacccacagaaaaagctacccttaacaaggaggagctcatggactccagactgatagctgggaaaccagcataggactgatccagaccccctgaagtggatgtcagtgaggaggcctcagaaatctatggggcttctggtagaacatcagtacttatccctagtatatgaatggactttgggagaccactccacatagaggaattctctctcagcctagacacaggagggaaggcctaggccctgctccaaatgatacgaccagctctgaagttcccccatggacagtctcaccctccctggggagcagaaagggtatgggatagggtgttagtggagataaggagaggaggggaggaagacagaactgggatttacatgtaaaacaatagcttgtttctaatttgaattaaaaaatggataagtaaatgaaaaataaataaaaattgtacaaaaggcatgaagaaggaaaagacagaaaaactagagtttgctcacagatggtatagctgtatcatgataatagtttatcaaaaatttatattttagtaaggtagcatgactcacagttatgtttgttaatttttattgtcaagttgattggatttggaatttccttgcagacacacatctatgcacattcatggggtttttccagaaaggtttaactgagaaaggaagattaacatgaaatttgggtggcatcaaatcctgtgctggggctccagatggaataaaaaggggaaaacaaagaattcatatgacatgatcatggcagggatctcttctatctacttcttggtccagtcagatatgaggagtcttgacacatgttcctgctaccatgaactctgccatgcttttcccaccacaatagtgcacccttaaaccatgggccaaaataagaccttccctacttctattaatactgctatcagagtgataaaaataagtactaaaatttgttaccaaaaagcagagtgttgcagtgataaacttgaccgtgtttcataggactcattcctgtgagggaaatgagagttcagagctgaggctacagaacgagaaagttgtcagtagagcttaattggccagtttttccagagtgatagaaatgcagacagtggatatcctggtcattaatttcagaatggaataaggactctactgaggtatgcactagggccattcatgttatgtgctggcaagtaattgggatatattctgctgggatcctagaaatatgactcacagtgaattttaaaaatgtggatcattgtctggcagaggaaatttgaaaacaatagaacatttggactaaggaatggctatactcactgcccttttcagatctatgatgacagatagcagaatgatggcaaaatgtgcagtttagtgaggaaagtgagtttaagcactgcagacaaagcaggttcgagaaagcatccataattatgaaagacatgatgccttaaggagaaacctcacactttgcactgggaaaataggaaaggtacattaaggataaggcttcacctacgaaaggatccagcttgtaaagatgaggtttcacttataaagggaaagcctaaaataacaatgttgttgtatttacaaaagaataacaaaaccaaaaaccaataaaacacctacagaagtgttttcctgggttctggtgctgaggcatacagaggccattgcagtagagagaaagaggccagactacacaagtttcagcagaacttggtaggttgttcgtgaatgtaaaatacaaaagagaaagacatcattcattgttacaccagcattctagaaagctactgaagccaggcaatgtgtggaggttcagaatccctacagaggagctgagaagacattgcatgaagcagtggaggtgaagcctaagttatggtggagaaccaaagatgttacaaacgctaacaccagtctttgatgaaagatgaaggcattcatggaactgacctaaaagaggttatgtgtactacaggtaagagagctaaggaggagaggctacttaaagttgttggagttcaggtgattccatcagaagtccatgccagatgctggctatggaactgtaggatttggtgtcttcatttacatttccctgcttaattttagagacaagattgctttgaaactggatctcactgagtagctactctagctggccattaagccccagggatgctcctgatcctgtcttcagtaacagctgcatgcacccagcctcttccatagttgggtgtcaggaatagagagaaaaaattccagaaaccttcttgtctattgtatatagacacacacatgcccctatgcctcttactaaatttatcttttgtatgccaatatttaaaaagcaaagcagatacagcctaaatctgagaatatttccattcttgcttattgtactctttcctgactcacccattcaaggtagaacaactgtgaatacagggtgttctctgcatggtgattgatgcaatgaaattacatcatcctgtctcatggtctatgcatccaatggggagatatccagcttctctgtgccaaaacttcttttgctatcacaagtgttactgggtacagggatggctcagtgatgaagaacacttgctgctcttccagaagacccagattcagttcccagcatccacatagcagcaccatttgtaacttcagttctgggagatttcaaacttcttacataagcttccacaggtgccagacactgaagtagttcacatagatacatacaggcaaacacacacacacacacacacacacacacacacacacacacacacaaaaaaaaactttgtcaaaagactgatcttgctggatgcttagactgcactatggtggactgtttgaggcaaacacaggcatgaggcaaaaattcggaggaaattctcagatggtctatacttgaggagtctgctttgtatgtgcatagataaagaactctaatttttacagaagtaatttcactcaacacctctggcttccatcttgttattgcagcaggcaactgggaagggagaaatgaggaaagatattttctaaataatcacatagcctttctagtcctggtcagctgttttcttgtgagctgagaaaataatgtatgcaaagctgagagggtatacaaaatcaggatctcaaatttgcatagtcaccttcctgggcaccttggtgggaaggacctggatacttctgatcctcaagacagccagaattttgttttcccacttttcagtaaaaagcaaggtccagagtacatccccactctaaaggtttctgtaaaacatttaccaaaacattgtgaatgctagcacttcagcaaaaatctgcttcttgttatttgttctggggaaactctctgtgtggatgcagatttataggtaagaacttatcatagaacaatagtgattgcctgttctttccctcacacaaggtggaaaagatcaaatgttgttgattttagataggaagtactcatctttttgtggatggctgtacaatgaaaagggggcagtttattcaaattgagaagcatgcatatctactaatacacaccaaaaggaaaatctttttttaattttgagattataatttgattacactatttctccattccttttgtcccttcaaactttctatataccctcactgctctctttcaaattcatgacctatttttaaatgaatttctagtctgtggaccactttgttttatatgtcatatccttgtaatttagtactttctacttgtacatgtgtatcataatttttattgtaatagttcataaaagtaatgatggcctgtgaactttggattatataatctcatcattctctggactcaatcattataagtttttcttctattccttaaagttttcataaaaattattctttgaattttctatgaactgttctaactggatatactttcactaatgtgaaaacaagatctgaacagcctaaaaaccatgatgggctttatccattaattatgctaagacttcccatttctacaggctctttaggtttcaatcttcagcattaactggacatcatgcttttgtcattgttgtcatacatttgctcatttattatttgtttatttgtctgtttatgtgtgtgtgcctgcatatttctcaaacactctcatgtcactctgtttgctccaattataacaatgcctgtgattttataccaaatttatcttgatttttgcgtttgtgccacactcagaaaatgtttctagagaaaaagtcagatggcctatagggatattagatgcccacaattttgatactctccaaggcttcagaataaatgcaggtaactttttttgtttcttttattgagtggttaagtgttgctactgtcatctactagaagcttagggattctgttatatagtcaaccgcatacttaattgccttcaaaatcaaaaaacaaattgtcttggccaaaatataatagagtccaattagagtatctctgctataagaaataaaaaggaatatattaacagaaccataaatgaggaagggaatactatacagaaactacagacaataaaagaatgataagaaaataataagacaagtaatactaaatgctaattcaaaaacatagaaatctactgctatagagcttcctagaatatgtgtgtacataaaattaatctaaattgagtgtccaaataatataggagacaggaccccaaatagataccctgagtcatcaaattaaacctccactgccaggattgcataacatcttgttgagttattggctaaaggggtcccatggaatcctcaaacatcacaggctattgctaagggttactctctataatctgatggcaaggccatattgctgaggccaacacttctttattgcattgagcaaacagaagttgagttggtacataactagaagtttcatcttcctgaatagtgtctgtgatactggaagatactttgcacactctagaagagaaaggcaattgtcaatatcacccagctacaagtatgtgaccgaaaacagtgaccaacctccaagacatactggtacaataatggcacaattattatatcagtaaccaactactttttaaaattagatttaaggcctattatgtgaagtgtaacctatgtctgacactactataatgttaaagaacacaagactagatagatcactaacttagggggaaaacacaaatattattattttgctaaaggaacatagcaataaaatgactcctaataacatactgctatacccatagatcagtattttcctcaactcacatcatagaaagctcttgtagtgtatgggaattagcacagagacccaaaactagacaatgtgctgagaatgagagattatggagctcccagtcataaatgctacatcttcatcaaacctcttgcttcaagacccaggtatccatgtggatgagaaggcacaaagatcttaagagccagagggtgtaatgtgagattctctcccagcagctcctgcctcccttctctgccccaaataacacacagatgctatatcaattataaagctattggctggtgactctggcttcttattagctagctctgtattaattattaacccataactatcaatctaagtatttccacgtgggtggtcttatctttctggagaaaaagtccgaacctgttactcctctcacatcctacatggtgactggctcagcatctccgcagagatgaaaagagaagaagagaagagaagagaagagaagagaagagaagagaagagaagagaagagaagagaagagaagagaagagaagagagtgatttcctgtttgtcccttcttataatctgattctgctcaactttgtcactttctgcctctagtacagacctccagatatctatgattagatagtaacagtttctgcccagctatgtcactccttgggatcacatgatgattcctctctgcctacacttcccagaagcctccacatatcctagtcctaactatcttgctgccctattggccaacagtgtttattcatcaaccaataaggtaaacatatacacagaagaacattccccatcaatcagaaattgatgactccaaagcaatgctgttcttcacagcaggactacagcatatatgaactcacaaagactgtggcagcataccaagacttgcataggtttaggtcaggtggggtcccatcagagagactgggaagtgcagtgagcacagggtccacctccaaccaaggagctagctatcagaaaatgacagcctctttaaaaagtaaaatcaattttcaccaagtaagtgccactgggtacattaaccataaaacaagatccctggtattttgggaatactgttgttttctttttgcattttttcttattggttttattgcctgttgttttaaaatttatttttacttttttctgttttagtttttcatttttgtttcttgcttttttaaagagagagagagagagaatataaagttgtgttggtagggaggtggaaaggatctggaaggaattgtgggaaaggaaacatgatgaaaatatgctgaataaaaataatttttaacaagaaaaagaagaattgaacattatggaactggagtttagagggctaaaagctaccatgtgacttcgttgaattgaacttatatgctgtgtacaataagtgctcttcaatattaagagtcatttctccagacctaataccttagttctgtatttttctttgagttagcgtttcgttgaagccctggctatcttggaacttgttctgtagaccaggctagcctcaagctcagagatctgccttcctctgttacacaaatactgagattaaagttgtgtgccaccattacccagcagtcctaagtttttttaaggatatctcttccttgtcccattactggtattaatagctattgttatttaggtgtgtttacattgtgagaactctatcttttatctctaggagcaagtacctacttttaaaaatattttcatttattctttgaagttttgacacatatacacaatgtattttgtttcttctttttatttaaaaattatttttcattttatatgccaaccatcgctctccctctctctacttcccctgcctcccccacatcccccttcccacaccccatagactcctcagagggggtaaagccttccttgggaagtcaactaagtctagcatacaatgttgaggcaggactaaggccctccctcccacccagtatcaaggctgatcaaggtatcccaacatagggaatgggctccaaaaagccagttcatgtatgtacctggcataggtcctggtgccactaccccctaaacaggtcaagccacatacctgacccacattcagaggatctagtttggtcccatgcatattccccaactgccagtccatagtctataagttcccactagcttgtgtcagctgtctctgtggttttccccatcatgcccttgaccacctggttcatatgatccctccttcttctcttcacctgaactcaaggatctcagccctctgcttggctgtgtctcccatcagttacttgatgcaagttctatgatgacaattagcttaatcattaatcagaataaaggggaaggcccatttagacaccctctccactctgctaggagtcttttttatctttaaatttttaaattttaaaacaatcttttctcattttacataccaaacccagttcccacactctctcctcctactgctctgtccaccttcacccccaccccacccggatccactcctcagagagggtcaggcttccagtgaggagtcaacaatgtctggcacattactttgaggcagtaccaaggcccttccccctatatctaggctgagcaaggtatccctccaaagagaatgggctccaaaatgccagttcaagtactaggaataaatcctggtcccactgccagtggtcccacagactgcccaagccacacaattgaacccacattcagagggcatagtttggttctatgaaggttttcccactgtcagtccagatcagtgagctaccactaactagctcaggtcatctgttttgtgggtattcccaacatggtcttgacccctttgctcatattattgctcttccctctcttggactggactctgggagctcaacccagtgcttagttgtggatttctgcacttgattccatcatttgctggatgaaggttctatgatgataattcaggtagtcatcaatcaaattaaaagggaagatcagttcaggaaccctctccattaatgtttagagtcttagctggggtcatccttgtagattcctaggaatttccttagtgccaggattctcatgagccccatcatgactctctctttccctgctctccctctctgtccttcctgtatcttgaccatcccattccctcatgaagtcctccacactccacttcctctttctgttttcccttctccactgcccatgctctcacttttgtcaggagatcttgtctatttccccctcacagggggaaccaggtgcatctctctaagagttttccttgttacctaccttctctggagttgtggactacagactggttattgtttgctttacacctaatatccactaatgagtgagtacatactgtgtccttatgagactcagttacctcactcaggatggttttttctagttctatccatttgcctgaaaattttatgatgtcattgtttttcaccagtgagtagtactccattgtataactgtatcacattttctttatccattctttggttaaggggtatctagattgtttccaggttctgactattatgagtaatgctactatgaacacagtgagcaaatgtccttgtgatgtgagtgtgtaccctttggatatatgcctaagagtggtatttctgggtccaattttctgagaaactgccatactgatttccaaagtggctgtacaagtttgcactcccaccagtaatacaggtgtgttccccttactcaacttcctctccagtataagcagtcattagagattttgatcttcaccattctgacaggtgtgagatagtatctcagagtcatgttgatttgcattcctctaatgactaaggacgttgagcatttacttaagtgtcttttggccattttagattgttctattgagagttttctgtttagatttgtacctcttttattaattggattatttgatattttggtgtctaccttcttgagttatttatatactttgaatgaagccctctgtcagatgtggggttggtgaagatcttttcccattgtgttgtgtgccattttgtcttattgattgtttcccgtgccttacagaagcttctcagtttcaggaatgtccatttattgattgtttctctcaaatctgtgctactggtgctatatttaggaagtggtcttctatgtctattccttcagggctacttccccctttctcttttatcaggttcagtgtaattatgtctttgatccatttggacttgagttttgtgcatggggataaatatagatctgtttgcctttttctacatgttgacatccacttatgccagcaccatttgttgaagatgctttctcttttccattgtataattttggcttctttgttaaaaatcaactgttcttaggtgtgtagactattatcaaggtcttgaatttaattccactggtctacctgcctgtttttatgccaatactaagctgttttattattgtaactttatagtagagcttgaaaccagggacggtgatgcctccagaagttcctttattatacacaattgttttagctattctgtgaatcaactgttcttaggtgtgtagactattatcaaggtcttgaatttaattccactggtctacctgcctgtttttatgccaatactaagctgttttattattgtaactttatagtagagcttgaaaccagggatggtgatgcctccagaagttcctttattatacacaattgttttagctattttgggttgtatgattttccatatgtagttgagtatttttcctttgagttctgtgaagagtcatgttgggattttgatggggattgcattgcatctgtagattgctttggtaagattgccatttttactaagtttacaatgcctatctaagagaatgggagatctttttattttctgataactttttaaatttcttccttcaaagacttagcgttcttgttgtgcggtatttcatttgtttggatagagttaccccaagatatttcatgctatttgtggttattatataaggtgatgtttctctgatttacttctgagcccatttatcatttgtatatattgattgtttgagttaatctttagaacatattttgaacttaaccattttttactaccttctaccaattccctggggaagaacccacctgtctatctcctgacttcatattcacttttataattattacttatagactcttgaatccaattagtgctgtatgagtgtgtggacatccactgaaacatgagatacctaccagagttcacattttcaaaaagaaattgttactttcccttagcagcctttaactgaaaatagctcatcaatcaagagtgggccccaagagaccatttgtgcacccatgctaaaatgttaaaagatttaaaacttttcaaattcatagctgtgcttgccatgaaaaaatacagtttaataaataatgccagaaataaagtatgagcatcacatctgctagagtttctatgtagttcagtgggagaagagaaagaaataaacagaaaagggcaaagggaaataacttccattcacacacacacacacacacacacacacacacacacacacacacacacacacttgtcattgatcataaagacggcaagtttaaaataatcttcaaattaatagtagtagtagcagctactggacctagtatgttagaacactaaatttataacatgtagatctaattatctaagaatgaatagtatttgaatagataagaaatgttttaaatctttaatataattaattcacaatatcaccaaagaatgaaataagtataaatgtaagaaaatataaaattgggagaccctatgcctaaacaaaggccacactggctgccagaatgcaggtagactgcctgcccacagaccccacgctcacccctcaggactacacaccttcacctcagtcccctattaaaagttaaatggagagaaactcaaagcaagtccagtagaataaggaacaagacaaggttttcatattcactatatacattcaatataatacttgaagttctagctagagcaatagataacagaaggagatcaaggggaatacaaattggaaaggaagaagtcaaagaatcattattcacagataatatgattgtatacattagcaacccaaaaattctacaagggaacttctacagctgatacataccttcagcagcaaagtggctgaatatgaccataaaatcatatgacttaaaaagaagatatgaggaaaagcttgtgtagagccagatcttactgcttagcattgctatggtttgaatgtttgtatgtccccaagggttctatgctcgaggtctcaccaataggataggtaatagaaggagctgaggtccgttgggaggtgattttgtctccttttcaaatgttatgaatgctttcataggttaagcttcagaaagcaagcctactctttcatcccaagaaggcacagctagagggttacctaacaaggtcgcacaggataaaaaacataccagtgtcttgatcatccacttcccagacctgagagaaataaatttatcaacctgtgactcctgattcttagaggctttcaggacatgctgtgtaaagtatcttcccactcctgacttgctattgctgttgctctttttcatctaaggtatcagaagagatgctctacttacagggttctcagatgcttcagcttctggagaactccctgcggaagcacctccctgagtccttaaaggtgagagtagaacattctctaactgaggaccacaccttgctgtgactgaggagggacagaggtcaagactcactaagcactgacatcatgcatttctcttacctatgcttatgctaccagagtagaaataaatcttttatttattttaaatatttgcccaacatttaaaaagcaaattgctgctccctctgattaaacccatgttactgtttacttgcaaaggatacctcacaatttttgtgagaacctgttacaaaatgaaaacttgaaagttgaagatataggtcaacagtagtctttgtctagctcatgaaaggccctagtcttacttgatagtaaggaaaagaaagacttttcctgattcttatataacaaatcactgtttagttgaaatcatgttagatattaagtaatatggattcttacttatttaaaatttgctttagttgtgtccctgacatggctctatcatgcatttctcttacctatgatttttttttaatctataacattttttcttaattcaaattagaaacaatcctgctctacatgtcaatcccctctccctcccctactcgcccatcccccaccagccccccactccacctaccccctgctccccagggagagtaaggccctccatgggggatccccactgtctgtcatatcatcctggcagggcttaggccctcccacaagtgtccaggctgagaaagcatcccaccacatggaaagagcacccaaagtcctttcttaagccagggataaatactgatctactaccagaggccccatggagtgcggaggcctcctcattgacatccacattcaggggtctatatcaggtcccgtgctggccttccaggcatcagtctggggtccatgtgctcccccttgttcaggtcagctgactctgtgggtttcacccgcctgttcttgacctctttgcttttcaaccctccctttctgcaactgagttccagagttcagttcagtatttagctgtgggtgtctgcctctgctttcttcagccactggatgaaggctctaggatggcaaatatggtagtcaacagtctcattataggggaagggaatttagggtagcctctccacaattgcttagattgtcagttggtgtcatccttttagatctctggaaatctccctagtgccaaatctctctttaaacttataatggctccctctgttatagtatctctcatcctgctctcctctattcttctctcgactcaaccttcctgcaaccccatttccctctcccctatcttcatgctcccaattagctcaggagatcttcgggggaaggtttcttaaagtgtaaaatgtgtataatcagatgccttttgtagcatatattatttcaatgaaataagatttaatgtacaagaatttccagttctctttttatgtatctcataactcactatggaattttctgtgaactaggatttgacctataacattttctcagaaaagatgaagtaaagttgtctgtcataaaatatacaaatgatgcagaaaccaaattttaataaattggtgtgggactcactgcataatcccaggcagcccttgaattttcaacctgactgcctcagcctccctattagcccagatatcagacaagtatcactaagcctgactaaatcttaacttacaggagaaacaatggtccacacatatcaacagccagatgatgcagatctaagaatggcatagatcttaaagcagcaatcacaaacatgctcccaggaacagtaaggaaagcatttgcaatgaatgggaaaacattctggaatgtctcagcttcataagatttgttctgtgcatgaaaagatagaaattcatgaaaaattctattagattctacagcaggggagttcatgagtttactcataaattgcatctttttcatgttttgttttattaatgtttgaaggatattgttgttagaataagcaactagacacaaagaaccattttaaagattcatttattaaatctttccaacaaaattttgtaattgcatagtaattgttctagtcaaatatgtgtggctttctaactctttgtaatgtgatgacattcctattgtgttgaaatatttaggcttatggcactgtcttccacatgaataagggaaacccattcaaggtcaaggctctggtggacaagtggcccgattttaatactgttgttattcgaccccaggaggaggtaagttgcaatataaagtaaatatacctgtatctccacatatgttgcattcctagcatgtgtctggctgtatgctagatgccacagcctacttccatcctaagaaatagaaatgaagtgtaatagtttcaaccaatgcactgcctgaaggataacatataaaagtccataaaattacagagtgagcaagaaaggaactacacaaaagtatagtaataacccaaggagaatgttaactaaaggtgcagatcatacacttttatcctcatccatgcctttattttgcttggcaacactggctgatttcaattccaagtatactttatcacttcattatttcttacatcttgtttgttggatttagaggcaagtgatggaaagtcatatcaacttaagattatgtggagacataaagcatagcttgatcttttcttataaacattaaaacattttctgagggctggagagatggctcagtggttaagagcagttgttgttcttgcagagtaccaggattaggttccaagaactcatggggtggctgccaactgtcagtaaccccagttatatggaatctgacatcttcctctagtgtctgaaggcattgcacacatgtaagacacatacatacatgcaagcaaaacattcatgcccataaaataaaaataagtaagtttttatagaaaaggacatttcctaagctaggtttgtatttgtaacaagttagttcttagttccattgtcaactattatctgagggtaaaacaaatttcctgtcttaaaaatcactggacttggggctggagagatggctcagagattaagagcactgactgctcttccagaggtcctcagttcaattcccagcaaccacatggtgtctcacaaccatccattatgagatctggtgccctcttctggtgtgcagatatacatggaagcagaattttgtacacataaataataatatctttaaaaaatcactggacttgaaataatccaattgatctcactatatcacagcttttcattgtaatattggcttcccattgagggactgctctgcctttatatcagttatctacagcaaagtcaataaaagaagggactataggaggttaatgttacagggagagaatgggagtttagtcatgattccaagtggaaatattttgccaacatgaatattgaaggtgtcttaaatattttacaaggcatagcaagaaaatcaatagttggatcttgaatatcattatacagtatacaatatattacttaatatttactagaggaattaaaatactagaggaataaaagtattcagattatacattagtggaatttctgtgatattttccttgatatttaattagtcccattatgcatttgtaaacttgttctctctctctctctctctctctctctctctctctctctctctctctctctctctctctgtgtgtgtgtgtgtgtgtgtgtgtgtgtgtgtgtgtgtgtcattgtttgcttcaggcggttgtcatttacttgataataataaatgatttttgaaggactgtcgacctcattagctttatcattggttccctatgtgtacatgtatattctgattctgttttcaatatagactttaataccagagcattcacagcccacagcaaggagtattcttttagctaaatgttttgcttttagtttgttatttcaattcttctaaatggattttataatgctgtacttactctcaagttggggtaatgtctttcagggtgcttttatgttgaatttagtcatggccttttctcttgatttcacattgttaatagttacaagataaatccacaagaagcattacttctaatattgtaaaatctctcgatgtaactggataccaataatcaaacaccacaacacccacaaacattctggtttattctttctttctaaaacaggacatggcagatgaccttgaccactacaccaacacttatctaatatactccaaggatcccgtaaactctcagaagtttctcagctcatcagaagtcattaactggaaacaacatttacagattcaaagtaagagagctggggagtgggggggggcttttgttacctcctgtgagcacatggtggaagtcactgttccttttgaacaagtactttacatcccacacaaatttttgcaagccacagacacttagcatgctgccctgtttcttcctttggcatctatcaaactcaaaagtgaactcttttaagagctgccatgtttaaagtttacagaggaaattttgtgacttgagacttaatttttagtatgcccatattttatttaagaacataaatgtaggagcaacgaatctgaccattccatctctgttttattacactgtcacatattcaaggggatgttttggtaaacaagactataccttccggtttgcataatctaagattgaaacctgagtgggccagttattagctgtgtggtaaaggctaagtcacttctgctatggagaccaagtttttgtgaaaaaaaaatggttataatacttttcaaaacatagcatcctttggtattaaatgagacatttaatggaaacttcttaggaatcaggtttctagttatataggatttcaaactttctcaacatcaactcaaaatgacaatttttttagctaacaattgtatgggtaggaaatttggctcaactaggtggctctgctggtcacacctagtttcacatatgggctcagtcacctggagtgttgcatgtgggctagcaggaatgggctcatcatgatcccaagtctggcatttcataataacattgtgccaactctgaactatagggatggaggtggattgggtgacatgtaaatactgcaggatcaggaacagaaaataaaagccaatttctttgattcttgtttactacattaccctctttcccatgagcctaaacaaggtttaggagcaaaccaaatctaagtcatggtgaaagaagtcatactactgcaatagaaaggagctgagaaccttatagtaacaatttaatgaatcgagtacatagaaattatccattcaatgtcagtcaccatgcttctaattccatctctttggtagctatactcttaaatagccagggtttgtgataccatccaaaacttagatttaaaaaaacatggaaaggatataatctctatcatattaagcctgtcatgatttaatacaagacttgatgattctatgttcatattccctttgatttcactagacagattttcctcactattcccctcttctttggaggagctggggtcgagacagagtttctttgtggctttgggaactgtcctggaacttttctgtagaccaggatggtctcaaactcacagagatctgcctgcctctgcctcctgagtgctgggattaaagacatatgccaccaccacccagcttggatagcgtttcctaaatgttaagatgactaatggtatatccattgcttcctcatattctccatcaaggttcacagtcaagcctggacaaagtgatagaacatcttgcagacattaatttgggcaacgtcaagcatacacaatgctttctctatatggtatttgacacagcaaagaaactgcttccttctttggtggataccaagaacttagtacagagcagtgacaagcccaaacccatgtaagtgtttgagaagaggttctgtaccttttactctcttactaatgacttacctcctgtattagatttccaaagtggtcactaaatgtcaccttaaaacacagagctaaaatcaaagcacatgtggtccatcattggtttggagtctaggtaaaaatcaagatttgagcagggctgtgttgcgaatccacagtccagaattccttctgatgtcttccaacacccagtgccattccaggatgaccttggctttgggatacattacccactcacagaaacactttcacataaccttctttatcatctgtgtcttttcctcttttgtttattgtaaggacacttaccaacagatttgggacccaccaaataattgggatgggtttatattgaagtcctaaatttgtatattcaaagattccttttctaagcaagatggtctgcagaaagggctggcaagatggctcagcagccaaaggtgcttgctggcaactctgattacctgacttaaaccctgcaacctacgtgataaagaagagaaccaactccaaatacttgttctctgattttcacacaggaccatataacatcaaaataaataatgagtaaataaataaataaatgcaattaaatttaattgcctataccagttgaatgtgggttgctgtttaacctgccatgccctcactacgtctgctagcatttgccctggtaaatatataacaaatattctgcagagtagctgtctaattataataaaatttaagtaaggaccatgtctctctcctgcttccaaaatttcagtgcttcctgaatattttcaaacatttctgaactccacagctctctaggaggaatttttatctacctctcaggccttatattttatcttgtttattccctcctaaacttctagtctttgttaaaaagtattacaagttcatattagaaacatgaactgtcttgtagacatgagcctaaaatcagaggtgagtcattctttcaaacaaagtgatctaattcaggtaatctaaaggggaacgaggttgattctatagactgagaaaagctaaagtaacacaaacaaaatgttgtcatttcaatgttacttcctatgtaaaataggaaacgaagataacattggaattcaggttacttcaagttaattattttggtagggcttaaagcaaagagaacctcactcatattctctgtctatttttctagctcactgtcttgctctctccttctctctctcttagaatgtcaattaacaatctattatttgtttggtgacacgaagcatctatgtgcatgattttatgctgcttcttgtgttgaagctaaatgcagaggttaatgtacaatgatgctatgccatggctttactaccatttctatttgaccttcatgagatcaggcctctaatattagcacctctctttcaaagcatctctctcttaagcagaccagttttacactgacaactttccttgttatccagatctactcacaagttacctcatcagagtcctgggaaaaacacctcagctttattttactcagagtactcctgagtatttgaaactaggtaatatattctgcacacttgatgtttgactcatcctctaacaataagtaaaaccctgcatgagttcagattgtcagtagctatcacacagtgggttttaaacaaatacgcgttcagtgaattctccccatagaacaactggaataataaaaatattctaataaaagcattttaataagtctcacattgttcccatttttgtttaatgtaatgctgagtagaaccaaaggctggcagtcactatgtgatttgaggatactcaatcttacaaccctccgtgaagttttctacctacaagaattctgttctctatgtaaactacatggcaacctggagaacactgccaactagaagctcctggaaagtttgtccttctatgatctagaggacaacctaacctcttgacagaaatcagaatccagaatagtttgctcaacacatggatgacagaacctgtaactggagttgaagtagagtgcttagctcctcctccataggcctttccaaaatgactcttgaagcctccttacatcactgcatgtgtcttcagaaatcaggaccctgtgacacgtccaacttcattccacatcactgcccttgtttgcatttgactttatcttttgtgcaccacagtgcctaacccccacaagatacgaaattctacgattctgaactgtggcttttctgcttgtacatttgttttagaaagcttgctaatgtcggcaaaactgtttcctttctcataaaataagactgataatatttgaactccctgactgaaagatcatatttgagctctctaactgcaaagataatggtcacaggcaaataaactggaaatgttacctggagcgttttttcctgttaggcactgaatctgagcccccatcacactgccttgttacactacagggcaagttgctttttagccctgctcactagatggggaaatacaaaaggtgagagtaattactcagactcatgaacaccatgttgataggaacacaggtagtctagctacagagaatacaatcttagatattctactttttgcctctttgggcaatgtaggggtaagaaataaaattgttcatagcctatgtgattaaggactgaactttcctgtttttctccatagtaacaaagaggtgttcaaattcacctccctggatgtcacacacgctgccttggtgaacagcttctggcattttggtggcaacgagagaagtcagaagtttattgagcgctgtatccacaccttccccagcttctgtattgtggggcctgaggggatccccgtgtcctggtgcctgatggaccacactggagaactgagaatgggaggcaccttgcctcagtaccggcgccagggtctcatttaccatatttctcatcaccagattcacactctaggaaatcttgacatccccctgtatggacatgtggataaaactaacttcactatgcagagagtagccgccatgctggctaatgtccgcatgccctgtaactggaaccagtggaactatgtgcctctataaggctgggagaattgcattccagccttaactttgagccaaagaaccacaggccctagtccaactttcctaagccagatgatctacatctacaaaacaaagatgaaaatgtgttccatattgaggtatcattgtctaaattaaatgagaaatgcattttctgaattaaaaaaaaccactgatgtctagcagagttgcatgattgctagctatgtcgccatcatcatcatcatcgctaggtattagaatggaacatttgccctttttgagaactgagaaaagtttgtagcaacatgcagggcatcaggggtgaatgtgtgttgaagtctgaagtctaaatcagttatctcattgtacattactagttaaatctgagaattaccttctaatagtacaaattacaccataagttatagacatacaaaacatcaaacatgttgaacttcctttataagataaatttttactatgtatatgtgatcctttaaatatatatgcatatatattaattctgttttaatgtatttttattaattctttgagtatttcatataagggtattttgatcatatttaccactactttaccctgtatcagcttctggatcttctcttttctatctcactctcctcaaattcatatcttcttttacccttttaaaaattttaccaagtcaaattagtgatgaccatatcctcatagatgtggggccatccactggagtatggtcaaaactagatgtccctcccctaactgttaatagatcctcagtttaaaatggaggcttgcacatcctttcctgtccccatgctacaatactgactggttttgaccttgcataagtcttgtcatggctgctgtgagttcaagagagcagtttatttgtcatgtcctgaagatgctgttttactccagtatttcctgttctaactacttttccctacattctgtgattgcttctgggtcttggtggtggggggcatactacagatgtcccatctgtgtctgggcagtaacttattctctgcagtttgaatccttgtgaacttctgcattaaccattgtctgatgcacaaagaaacttctctgataaggtctgagagctgtactgattctatgtctcataagtgaaaaagaaagcatatttgagataggtattaccatcacctgttagtcatcatgctcttgatattagatgtataaaaaaaacaagacttgaatttgtaatttccaaaatacataatttttattttcatttgtctttgtcttacttacttttctattgctgtgatatttcttgcaccataaccaaggcaacttataattggcttagagttttagagggttagagttcatgatggcaaagcaaaggcatagaagcaggaacagctagaacaacagcagaaagctcatatcattttctacaaataggaggcatagaggaagaaacacactgggaatggcaggtgtctcctgaaacaaccaagcctgcaccctttgacacacctcctccaaaaaggccacaccttctaatctttctgaaaccattccactaactgagaaccaagtattcaatatatgagcctctagggaacattttcattcagagcacaaagttgtgtattcatggtatatggtgctgggctatgagggcattttcacacaaacatataatgtacttttgagtgtattccacaccctactctcctcacatacctttcccatccttcaccccttctgttagcaaaccctgtgttaacacacacacacacacacacacacacacgcgcgcgcgcgcgcgcacgcgcgcatgtgtgtgtgtgtgtgtccagaaatgagaagaaatatgtggtatttgtcttgattggtttactatgattatttcaagttgcatcactaacttcacctttatggctttatggaagtccattgtgtatttaaaccacatttctttaacctttcttccactgtaacaagcacctacgtttattccataactgtctgcaaacagcaactacagtaaacattggatggcagttgtttctgtcctgtgttaacttgaacttctttgggtaactatataggagtggtaaagcctggttataaggcagttctaattttagttttttgaggagccttcatggtgactggactagtttatagtgaaaccagcactatatgcacccgaatttgtaatttgttttcttgatggttgtcattctgaaagcagtggaaaagaattttcagatagttttaatttgtgatactctgatgattaggagtttggtcattttttcacaagtgtactatccatattcatttcattagaccatgtgttaattgtgccattgatctattgtgattttactaagtttttcatgtattttaagtgctaatctcctttcaggtagacagctagcacagcctgtagctccctcttcacttgacattatttcctttggtgtataagtgcttttgaatttactgaagtctcagttgtcaatttgtttctttcctttctcatttaaatttatctttgtgtgtgcatgtggcggggcaggggcacatatgccacaatggagatcggaggatgccctccaggtattggtctttgcagaagttcttgtttcagacaggttctcttcactttccattgagtacatcggctagctgcctcacaagcttctgtggactcttctgccttcacttcttatcttcctgtagtagtacagggattacagaaccatgtcctaccatatctgtctttaggtaggttctggatattgagttcacacttaacagcaaatgcttcattcattgggcatctcaccgcctgcctttttccttttcatggacagacaaataacagtatttttctgttacaagtattacatagtgttatcacacatttaaagttacacctggccctcatcaaggtcctccataaatatcatctgttgccacaggtctttccccaagctagaggcagaactaatcctgcctccaaacccaaagctgatacttttaagggtggagatgggttagggttaaacaactgcaagctaatcagcatgaacttcagaatctggctactggctgcagtctgcttgtgagatagccttggcaagctctggggtcgtgcagagcatcttacttgtgccagttacttaaagaagtgttagtaaaccagagttgcagattcttctgcaagatgaagttcagtgtcagtatacgcatttgtacgcgcatatacatgtgtgtatacatgtgaatgctgcatgcatgtgtgtgcgtgtggcagaaaagaagaagggggctcattgagatgaaagagagccaaccagaagaaggatagagaacaatagaggatatggaggtgtgaataggagcaaactacaatgatatacttggataaaaatgacagagaaacctatgtttcttcctaaacacattaacatttcctttaaaaaagattaggacaggaaagggagatatctcattaggcaaagatcttgccacatgagtatgagaatctgagtttgagttcacagcacccatataaagccaaacactatagcagccactctgaatgaagacagcaacatccctggcacatgcatcagtgatcaagagagtctgtcccaaacaaggtaagaagcaagaaccaacacccaatgctgtcttctaatcacactcatccatggcccacatataccgacactcataagcacatatacatttacatacacacaacacacacttatgcatacaaaaagtgaaattagtctcttctcatttggcctattgtctgcttgagactgggggaatacaagcaaaaattagactgaaagcactcaacttcctggttccttcttttgagaaattcaccgtgttatcaggccagtagaaaagggttccatggaactttatctcaaaagcatcccatgacagcctcacagagcacacactgtcatgatatagagcacacatcatgtgtttggaagcaagctgatatagaaggtccagaaatagccacaacacaccatagggctgactcagggatattgttaggacttcaccagtggtgggagggaaacattgccttcataaatatgtattaaagggtccttgtgagtggaatttacatatggatccacaaagaatcagaactattgacttagaagtatcgaatatagcatcaaggaagaacagctcataaatttaattaagacgttcctttctctttttatttggatgaaatgagacagaaccacaagaacaaactagttcctttcttatataaacaaagcaaatacttgaacaccaattttcatcctgagatgaatttttgtaaccttgtttgcatcatcaaatagtaaatttcatcgctaaaggagaaggtgccttctgtagagacagttgttattttacctcaaagttttcattcattccttcagtcattctctgccattgaatgttgggggagtttattatggggtaggttttaataagttaaagttagtcattgccctcaggcattgaactagattgaatctccaggcaatactgctgcttaaccagttttttctttgaaatagagaagaattctaaccagaaaccagtgagggcatcacacctgtagagccattgaggtttctgattaaagagtattagaattcacacatgtttagtgtatttcagacactgcaaagaagaaaaaactaaaaaaaacaaagacagaagtaggaatgtgtgatattttcagctgcatatttatatgtgatatatccatcaattcacctatctattctttacttatatgatatttttttttgatttttcgagacagggtttctctgtggctttggaggctgtcctggaactagctcttgtagaccaggctggtcttgaactcacagagatccacctgcctctgcctcccgagagctgggattaaaggcgtgcgctaccaacgcccggctttgatattttgtttattttaaatttattccttgtaatcctgaagaacatactgggaagacaaaatgagagctgaaatagagatgctttttggaaaaaagacttacaatattaaaaatttcaaaatatttaatcctccccaaacacttatgtggtaataggcaaaatgaacattattctacatgatggaaactagagctcagatgcaggaacgtgccctcgaagatcacacaggcactaagcctttgagtcagttttagaagatccaaagtttggtattattttattatagttgctcgtcctgggaacatttgttttttctttttctcccatagtcttatagtacaactcaaatgaaattataaaatatgtttctacaccaaatcatttgaagtcaagaacacacactgtcttgtcaataagatggcagacactaaagaattgtctttctccctcttgaagtcaaagaacttagctttcagaagcagctaatctgtgagttgaataacagacatgtccaatcttctctttacagtgtaggtgacacagttcaatctggtcaataagatagaaaactttctgtgaggtgtattataagttcttatagagatgtgtactttaaaaaaatgagaaatttggactgggaatttgggtcacttgcgtagcatgcataaggtcttgagtgccaactctagtactacaaaaataaaataaaataaaaactgagaaatcttttgtgaatgaattagggagcatgtaattcaaagacttattagaataccattcttgaaagagttttgaaaattcaaaagtgctttcagtgacagtgttttttgaggttaaaatacagggtttttattgttgctttattttctgtgtgtgtgtgtgtgtgtgtgtgtgtgtgtgtgtgtgtgatcgagagagagagagagagaagagagagagagagagagagagagagagagagagagatggggtctcactatgttgaccttgagttctgagagatccacccgcctctgtctctcaagtgctgggataaaaggactggtctacccatgcctgtctaacacatttttaaaattaataaactaaagaacatgaagttgtagagaggagaatggatattcacctaggttcaacaaaaaagtgagaatttttttcagttggccagccagattgcaaaagaaagtccaaaaggatgggtaaatcgttgcaggctcttccaagccagcagagggcagcaatcgtagccaagtcctaaaacaggagtggatgtttcctggcataaattcccagtgactttagcctaaatattgcctatcttctattataactcaacctttggaaaagtatgacctcaagacattggcggctccatcatgtgaaagtgagaaaatggcctagaagagactaactccccaaacaagggtcttaatgtaaagtctgcaagagataagtctatcttttcttccttgtgtttcagggaacaccagtgaggactgcaaacacacaagggatgcaaatgataattttgatcataaatcactgttttggagtataaagtaacaagcagaaattctaactagaaattcctaaaattgtaattcagcatcactgtttcccacttgtgtccaccaaacttcttaattctcagttagaactgaatagagataatatactaagaaatgaacgaatcaaaataaagtaaaataagggctcttatccaggtgaatgaaaattgtctaatttaattattaaaagaaaaaataaagctgtaacggcaacaccttttgctgtcctagttacttttctattgccatgacaaaataccatgaccaaggcatcttacagaagaaacagtttatccagggcttggagtttcagagggtgagtcaatgaacatcctgatggagagcagggaatcatacaggcaggcatagtgctggagcagtagctgagagcttatatcctgattggcaagtaagagatagaaagaactaactggaaatgtcttgggattttgaaaccttaaaggctgctccactgatacaccactccaacaaagccacaccccctaatcattcccaaacagttttactgaactggggacaagcactcaaatatattagcttctgagggccattgtcattcaaatcaccagactagtcccttttaagatttgtatcaatccatttgataatatctgctattgagagatagagaataggcatgatagccattccaccctgaatgcatctgataccctttgatcttggaaaccaatcggagttgaccttgttagttagattggaagaaaggagtgatgaatttatttgctctctccattattggaaggaattacaattgtgtggcttctgtgggtgatattagaggccatgttttgacaggaaggttttccaaaggttcataaaactcatgggagggagggagaaagagagagagagagagagaaagagagagagagagagagagagagagagagagagagagatttatcaactccaagctacacattagaaacacattagaattttcttctattttgaatgtatacataaaatcacagtatattttgttagatagtgagttaatcaccattttttacttagataactgtatttcaatacctttttgctttttccataatccatatgttttatttatttagtagattatcacttaccctgcaaaatggtcaagagaactagccagattgccagagttcactgaatatagcttcttaatagctgcacttttagggaagaggagttcagtggccagtttttaattctgtaaacaaagtctcaggaaacaaataaacaaaacagaaatcaatagcacaacacaaaacactgtagactagagagatggattgttggttaggaacactttcttctaaactatgaagactgaagtctggacccagcacccacatcaggtgattcacaaactcctgaaaatcttgttctaagggatttgactccccctactgactcccacaagcacccaaacacacatgggtggatacacttccacagatacaaacacatgtatattcacacagagtaaaataattttaaaaaatcttggtaatccagcaaatgaaaaaaaggccaagtgtgttatttccctagaattccttttcaaaacaatttggaagttatgggctccattttgtaattggcaatctgcaggatcttggtgtggcatgactgcagccatggtgagttgtaaatgcaatgagtacctcaagtaacatgacctattttccctacacagtttgttagcagagtgaaagcagacaacatttctgagtaatatgtagcgttccatgaccaggcactgacactgaacatatgactgactctttcacattagcttgcataaaccaggtatatccctggttggaagatattattttcaccttgacccgtatttatactctcttacttcagacataaatcacagggaatcattcagtcttgctcctacccaagaccatacttctagctgtaaaggccttaacccaacaagttatactctgtgcaatccagagtctgtcttcatggggacagttctcattgacaggaacttagttgtgctggaccatattaactgctaatttaaaaaaatgcatttgctttttattatcaaactagaaactgaaagagcatctaatgtcagttttaagacatgaagtcagaaacccaacataattcgtgcaaccttatgtccatacttccctgaaattggagcataaaattttggattattattgtaatctgctgaagcaagattacctttttgtcattcattttaccttattaccatgcttgcaatactgtattaaacttaaatctgtattccacttattttgctactcatcatttactataattttaaaactattcacaatcactttttatctggtgcatgtaattggattgaaggcattttgcattatgatatagctacaagtctatggagtcagccatgtggtggtttgaatgagaacggtccccatggattcatatatttgaaggatttctagtcagtggattgtttgggagggattaggaggtgtgaccttgttataggaggtatgtcattgaagatgagctttgagctctctctctctctctctctctctctctctctctctctctctctctctctctctctctctctctctctctctttcttcttgcttgtggacctcttgcttgtggataagctctcagatactgctccagtaccatacctgcctatgcgtcaccatgcttcctacaatgatgtttgtcttagttaggtgtttctagggacaacatggccatggcaactcttataaaggaaaacatttaatttggatggcttacattttcagaacttttagttcattgtcatcgtggtgtgacatggtggtatgcagggagacatggtactggagaaggagcccagtgtcctacattttgaccagcaggcagcaggaagtggtctgaactaggcatagcttgaacataggaaactgcccccactgtgacactcttcctccaacaaggccacacttcctaatagtgctaccatgagcttttgggggctaattacattcaaactgccacaatgctcatggactcataccctctgatactgtaagcaatccccaccagttaaatgcttccttttattaattgccttggtcatggtgttgcttcacctcagcaaacagtttcatttttagttaatctttttccaaagcatctgtcctagttactgtgaggagatagcatgaccaaggtaactctaataaaagaagatatgtaattgtgacttgttacagttttagagatttagtccacgtgataggcaggcagaaatgtcgctgagagctcacatcctgacctgcagacagtaagcagagagagactgggcctgtcatggggtttgaaatgtcacagcccagcttcagagaatactttctccaaggtcataactaccccaacaaggccaccccttcctaacacttcccactgttcaactaactggagactaacccttcaagcatacgagcctgtggaggacattctcattcaaacccccacagcaccatcattctctttggccaccgaatcttgatgaccccaaagtctttatacacatttcattcacatatttcagaaaggttctgatttgtttttaaacagtgatctttaaacagtgatcaggtaagctaccttcttttcttctctcttgctctatgtgataacaaaatgtcactccgacttgaatgtctcatgaataaactgattaggaataaggtcaaggataaagcaagaactcagctatatcctttacccaggtatgattcagccctttgcactcgcacctgctgactgttgttggcacctattgactggactgcagcactgtggagttttgcccaattgaggatgtaggtctcaatggtttccttagtctgtctccttctaagtgctagaacactcccttcatgcctgaccctccagttgcccatctctttcagagtcaccacagattgtcatcccgtggttgctcttgcagtttcaatacatgaagtgtgagaactttgtctatagatgttaccaggacaggttgcagctcttggagctctaatcctcagtaaatcttgcagaaggaaatacaaccagaacaaagagtgaagcaagagtgttctcagagctctgccaaggtctctactgaattcttggaatatcctgacttagaagaatgtctttatttacctgagaagttggttcataccagagagtttgtgccaacaatatgatgtgtagttgagacatgatttccatcacgtaagacttgagcatagagtggagctgaaactggtgactgaggaacttttagcagtcatgtgttcctcctaagcctctgtgagtgactccaataaaaactgtaggtctagtttccagtgagatactttgcccaaatacagttcctgtgtgttgtccaggactcacagtaggataatgaagcactggctgtgtgacatccctgggagaacagaactggctcttgtctgtgtacttttgttcttttgttgattttaattccctgtgtccttgcactgtaatcaccatgattaagacatctgttctgagctctgtgagttctaacagggaactctcaaacctgagattgttactggggaatcctgacataatacttctttagttttgttcagcccctcatctacttttgaatgtggactttggaattgtgccctgtagttcagaatcccactcctgtcattcacttgctgatcatgaaaaaacaccttcatcttgtggtggtggtgctgcagttaaattgtctatttagagggcatcatggcttttattctcataatttaaagtgcttggtatcttacccacagcgccttaaccttttattgcctaattgcaattattgtaacaaataaacacccctttttagtttcctggttttgaatatctttcaaataatcttacaattgatggttacttttactctcatgaaaaattcctttctcataattttaaatatatatatatacatatatatatatatcttcaatatatattcaactttaaatataatatactttatttagtcatcagtattttgcatcagtttctaatttcaagcttgccacacattatgtatttattatcttgattattgatcttttttgtttctatgttactgacctctacaatagttaatagtcctttccagtaggctagacctgcttgccacagcacccaagaatcagcctatttctgcatcccctgtactgggatttgaaatgctcatcatcatgcctggtgtttttacatgggttctgaggatagaacccaatcttcatgcttataagacaaacactttcctagcagatctgatcctctagccctcacaaattgttatttaaaacctcacatactctccacaacttaaaaaatcttagtatggtttctttcttctcatcaacagttctccaccatgctccacttttatccaactgagccaccataaatctatggtgtatgacatgacaaaaagagtacaaagctgacaattgcacagatctgaatggaactctaattcaatgatttctatcaggtttcttattttcctgtctcaatgctgtcaattccaaaatgagaaaaataggacatctgtcatttcctgattataaagattagtttgtgtcccatcataaatatgtggcaatatttcatatgtaataggaaatggttaaatagtaattattattagagttaattataatattgacatggtgattagatggccttcaattacctgaaactctgtcagatgaaaataaagaggtaaatgttttcactatgtctctgtattacatttctgtggtgtgaaaaacaccttgaccaaaagtaaccgaaggaagagcaggactattttgccttattattccagagggttaaaggccatcatggcaggatggtatggaagcaaatggttgaaatagaaagctggatgatcacattttatctgcaaacctgaagcaaagagaagaggaaatagagccaggctatacccacaaagttcactctagtgacatacttcctcctgcaaagctccacctcctaaacgttccttaaccttctcctgaagcacaaaaaaagggcaaccaagtatacaaacacgtgagctgagggagacatttctctttcaaaccaccacaagctccaaaaattctaccaagacagtaggtcgtcatggagactcatttctacttaccatgattagttttcctttgaagacagagttttctgtacctcaagatgttcaaacaggtaccacccattctgtgattatcctccaattctagcatcctgagagcctcaattcatttcaagaatgctttgttgccctattactgtgttctgatgagacctacaggtctcagccacccaagtgctgggattacaaacatgagacaccacaaacagtttatcctttgagttttcatgaaaggctctccaaaagaagtttctttttgtcctacacaggctgtgcacagactgcagcccttacatcagcctctgtatagtgggtaggtatgtacagtgtaccacacataacgtaagtgtttctttcttgtagagtgattcccagacacagtaacattgaattgaaggaagagcttgaatggtcaaagctctttcacaggcagaaccaattgtgcttcctgggaactttccctagtgaataaagttttcctgatccttccctatttttaattagtccaggttatacatcagtcaaatatgtccatgcagtaggtgccagaaggaactgaagggacacagagatgccatcacttggaatagtaaagttatatttgataaaattccaagtttgagatttcctcgctttaattacaaagacctgaaactggtgagaggaagcactctgaccatcattctctatgcaaaactaattaatttggattgtaaaaaaagctgacaaagggatgtctctctgctttctaaactatctggagaagggcttggagaggtggctcagcagttaggagcacttgctgctcttctagttgacccaggttcagttctcagaacccacatcagggattcacaactgcttgaatccccagcaccaggggctctaataccttcttctggtctcaatgggcagtcctctacacacagacacacacacacacacacacacacacacacacacacacacacacacacagagagagagaaagagagagagagagagagagagagagagagactggctggcaggctggctggctggctggctggctgggaggttaaaataaccctccagggaaaatataatggtgatataaaatgtgaatttttgtacatttatgtatttttaaattaaatttattcatttacattacatcctaattgcaatttcccctcttctcctcctattcacttcccttccctctccttcaccccatcccccaattcactcttcctctgcctctgttcagaaaggggcaggcctcccatgggtatcaacaagacatggcatatctagttgactaggactaagccttccattgtattaagactgggcaaggtgccaggtgttggtggcacacacctttaatccctgcactcgggaggcagaggcaggcagatctctgtgagttcgaggccagcctagagcaagttccagaatagccttcaaactaacagagaaaccctgtctcgaaaaaaaaacaaaacaaaaaacaaaaaaaaaaagactgggcaaggtaacccagtatgaggaataggttcctaaaagccagccaaagcattaaggacagcccctgcccccactactagggatccaataaggataccaagctacacaagtgtcacatttatgtagagggtctaggttggtcccatacagactccctggttgttggtccagactctgtgagtgtgtatgagcccaggttagttgattctgtgggtcttcttgtgatgtccttgacccctccataatctttcctccttctcttgagcaggattccctgagctcagcccaatgcttgactggggttctgtgcatctgtttccaccagctactgatgacaactggggtacccaccaataccctgcatttcccataggcagaacacactgtaagtcaaaggttgtgtagttgggctgatgtcccagtccctccactcaaagtcccgctgggtgaaaggagacggccagttcaggttacatatgcatcattgttaggagtcttacctggagtcatctttgtagatttctgggggtttccttgcaccaggtttctctttgaccctgaaatgcccccattccagtcttctctttcagtactctcccccacttctgcctcccaacctgacccttcgtgttcccatctccacctaccccactccacccaggagatctcttctatttcccctttcccaggagatccatgaatccctcccccctctgctttgggccttcttgttactaagcctctcttctgggtctgtggatcatttactttgcagctaatattcacttataagtgagtatataccatgtttgactttctgggtctgggttacctcactcaggtagactttagttctatctacttcaaatttcctgatgatggtttttctgactgctgagtaatactcccttgtgtaaatgtaccacattttccttatacattcttcagttgaggggcatctaggttgtttccaggttctggctattatgaataaagctgctatgagcatagttgaacaattgtccttatggtaatgcatcctttgggtatatgtccaaaagtgatatcactgggtcttggggtaaatcaattgccagttttctgagaaatcaccatattgatttccagagtgtctgtacaagtttgcactcccacctgctctggggagtcttccccttgctccacatccatgaaatatgattttgtgggggcacttactaattcagacatgctggtcagggttcttcattgactttctttcccagctctctcactttgatgacttagggtcttcttaaagctaaaccacagaaaatatgtgtatttgatcagatgaggtactgtgagggctaatgatatgttttatgttcaaattactgtacctaagggatctataaaacaaaaatgttgccgggcattgttggcacatgcctttatcccagcactcaggaggcagaggcaggtggatctctatgagttcgaggccagcctggtctccagagcaagtgccaggataggctccaaagctacacagagaaaccctgtctcaaaaaaaaaaaaatgcctctaacctctaagcccttcttgcccaaggacagaaaactttctggactccttagggctgctgttcatgtatgataacaagccaagcgtttttgcttctgtaaacaagcttggttgcctcaactgcataggatgtgtgcttgatcacacataggtaggaagtatgcttgcccctgattggacaaaagtgggaagtatttaaccttgtggcttttgcctttgtaagctcctgactaatgtaatttgctgccatactctaggaatccccagtacagaactggccagtgtttaataaagcttgattaaatttggctcaaaaattgtggtggtcttgtgtgtgtgtgtgtgtgtgtgtgtgtgtgtgtgtgtttgagagagagagagagagagagagagagagagagagagagagagagagatcaggtgagatattaatctttttgtgtgtgaatctaggtttttgtgggtgcacatgtttctgttggtaccatgtacacataaacaaagtctcaaggacaaccttaacctctggagtcatctaccttgtttttttggtacaggttctatcattgactttgagctcaacaaataggctcagatggttagctagtaagatcctcagatctctgccttctcaatgctggtatcacaaatgtatgcatcataagcagccgtgtgtgtgtgtgtgtgtgtgtgtgtgtgtgtgtgtgtgtgtgtgtgtgtgtgtgtgtgaagcactttaccaactgggttatctcattggcttccacaagtaggcacccttgaggagaattatcacaagaaatattaggagactgccagaaacaggattccctggtgccttcagaaggaagagaaatggcttggcaatttttttaaatgccatttttcaatcagcacctaacaattactcctacttaataccctcagtactgtgtcataattccttccatttatacaatgtgtgctgatcatatctgggtaatttatctatggcctcagatatagatcatttctttgtgcatccttttctacgtattctgaaacagccagttaagtattgccaatcacatttttcccaatgtcttctttggtttagtcatttcttaccttcatatggtatgctgtaggatgaacccagaaggaagaggggttatggagatgctaacctaaagcctccttcacctagaattgagggtcagaaagacctcaaaatcccaacttcagggtccagtagtaacttttgacattgaactattagcttgcctgactaaaagtccctcaaatacctcaattctgtagggtgccgttttatcttattgacagtgtcctttgcttttcagaagtttccccatttcaggaggacccatttattcattgttgctctcagtgtctatgctactggtgttaaatttaggaagtggtctcttgtgccaatgcattccaggctacttcccactatctcttctgtgaggttcaatgtatctagatttatgttgaggtccttgatccatttggatttgagttttgtgaatggtaatagatatgaatctatttgcagtcttttacgtgttaacatccagttatgccagaaccatttgttaaagaggttttccatttttcattgtaccattttggcttctttgtcaaaaatcaggtgttcataagtatatggattgatatcagggtctttgactcaattccattgatccacatgtctgtttttatgccaatagcaatattatagctctatagtagagtttgacgtcaggatggtgatgcctctgaaagttcctttctggtacagaattgttttgggtattctgagttttttgtttttccatatgaacttgagtcctattgttttcaaggtctgtgaaaaattgtgttgggattttgatggggaattcattgaatctgtagattttgtaggaatgtcatttttattatattgatcctaccaatccaagagcatgaaagatctttccatttctgatatcctttttgatgtctttttaaaagttcttgtcatacaagtctttcacttgtttggttagtgttaccacaagatattttatatttgtggctatgataaagggtgacattacatcaccctttaaatatatcttatgaactctggcttttgtgaaccatttaaaatatgtaatcttacaaattttagattctgtatctcttaataatgtcatggagatttggattgggattacactgaatttgtaagtggcttttggtaggatggtcattctcacaatgttaagtccactaatctagaagcatgggatgtctttgcatcttctagtgtcatcctaagtctcttccttcagagatgtaaagtttcaattgcagaggtcatatcttaatgactgtagaatgtaaatcccacagaaatccttttatacactgatatatcgtgaggtcagagaagtgtttggaatatgcactaatagtgtattgcttttgccacatccattttttctgtgtgttactgacaatcaaattaatgcaggagtgcaggaggaatttccacccatcacatgattatggaaacgaataaaaatgacaattaatgactaacattgatgaatacattagaaatattatgtgtctattttgtacctcacatagagaataggcacagggtaaatggaaagcagatctaagtctgtacctttgatctggaaacttccagagcaaaacaagctttggaggaccagaattagtggtgcactgctgcagcctcagcacttgagaggtagagacaggactatcattaatggaaagccatcttaactgcacagtgcatttgtggtcaacctgggctatgcaaggccctcaaaagaacaagggggaaaaaaacaaccaaaaaaatgaaccaatacaaagaagctcaaaatgagaaacagaaaggatgtaaatgactttatttcagtgtgatgaaaaactcagcaacccttaggatggtaaatgtacataagttttacaaaggaaagtgtcatatgaatatcatcatattgaaacaaattgttctgaaaacaggttgctagacttacagcatcggaagcactggaaaactcattagaaatataaaatctagggctcttaccatgatcattaagtcacagacagtaggtaagaatcccactgtctgattgataagaaaactttcctccttccctccctccttccctccttcccttttccttccttcccctctttccttcctcccttcccctcatcccccttccttcctctctccctcccttctttcctccctccttccttttctccccctcccttccccttcctcccttctttccttattttcttcccttaatttgtgacagggtctccatcttcccaaactaaccttgaatttctagttccaaggtaccctgtcttggtccctgagtatctaggactatagatatacatgaacacctggctattctgccaggtgcttctggagcatgctcaatttggaggaccacaactagcagccattggcttcccaacctgtgaccacttagtctccaagggacattaatattgccatatatttccagttatcaaaggggtgatgtgggatggagggagaggtcacttgataaagtgcttgctgtgtaagcatgaagacctgagtttggtccccaagacgcatgtgaaaagccaggtacagcagtgcctacttataatcatagtgctggggaagcagaggtagagggatgctgggggcttgcaacccagtcagtctagctgaattgactatgtgcagtctaaaaaatgtggagtagagtacaagagaaggcactctcactccacgtgtgcacacgcgtgcacgcacacacacacacacacacacacacacacacacacacagagagagagagagagagagagagagagagagagagagagagagagagggggactagaaaaaagagcgatggagcatgctactcacaccttatgggtagggacttggcaaacagcctccagaatatgggatcatacagtgatacttgtccaaggtgccaaaactgagaaacccttctctcaattgagccttcagggtctcggatgccacagtgtgggtgtaggttgatgtggatctatccaaagaaaactcagagacattttaagaatgaattttagctattgtggctgcaggagactgtaggatgaagattcccatacatgggatagggatgtcgtaggttatttttattggggagaaatcacttacatgagaaattgataatccagggtcagggctctgagcatccagtctctgcttctctccaagacccgactggaaccctgagagagaccgagcctgcctgtcctcaggcctatataccaaatgccccatatacacctgtggtcacgcccaaatgggcatggtcagtactgtaggtaccagtaagatatctccctacaaattccccttttagtctaaagaaaagattcagacttgatacaaaactatatacaaagacggcaaaaatcaagtaagcattaggaaaaggaagagtgtgagcatacaccctcaagatctaaagccagtaaaacaacaagagcaaatggtaaatatccagtcctagggtaaaggcataacagagattgctatagagctatactaagctggaaagtttaagtcttgtacctaatatttctatctagggagagagaacaataattatgacagtccaatcttcaacctcatcaaagacctgagaaggaagataacaatactagggtaagcgggaatcacaggtaagcaacttccaaaggtgcagtgaaaacaaaaacagcagactacaaggacagtcaaccaaagtctcacagcagcataggggcaaccagttttggctaaggcctacagtatcagactgaccaacacagaagcagggaggtagaaaggctgtcttactttgacttggcaaggttcagcagtcttctaaattatctcctgcaaatacagtagaacagcatgtccaaagtcagtagtcaaagtgggggcaattctttgcacaagaggccattagccgaggagagaatgaactccagaaggagtgacatcagtgccaaacattttctcaggaatagcttggtgctgtcaggaacaattgtgtctcgagtcagccgagtactaatattaaaacttttaaatgccatattctgcaggtctatgaagtatttgaagatcaaaagctatgtctgcctaatctcatagatataagaatgtgggtgaaaatgtctgtaattcttgggaacctagttatgcaaaggcttaagcttcctaaataatttagaaagcaccaagattacagcaatataactatatacacatatatatatgtgaatctctaaaacagcagtagagtttcagtgtcttaatcagaggtagaaccatatagtgcaacatgatagaaatatactaaattgtgtcaatatgcaagatatcttaaacatatgtaaaagcatatatacatagaatatgataaggatatttgtgcaccaaacaatgtaaatagaaagaagactttacacagtatgacaaaatgtaatacacaaattatccaagaaaggaacacaacttgatcatataagttacatcatatgagaatatataacaatgtaagttgtctatagctaataattactaaggtaaatcacaagaagatatattaatctacctatatcccatcctaaccatacctttcccatccataccctaaacttacctaaaagagatatccaagtctaaacacctccttccaaacccaaccctaaacaagtgaaaaacaaccctaaataggcgtaaattatcccttagtgtcaacagtagggaaagggggtgttgtattcttagaattacttcctgatgaaataggatgatgataacctcatgggatcctgtaggaagaaaattttagagtaatgaaaggctggagcagactagccgtaacatttgtacctagcctctgtttggcaggagatgcttgactgaagttcttatctgaagctctaaacagagtgtaataaaaaggtgcaccatttcagctagctagtctggagttgtctagagcaatatagtcccaaaccattttttagggtggtaattttgagttcaaaggcatcaactggatcaagtggaatcgatgaagtggggccccattttcttttaggagagttcaaagatcgttgttaggaaattctttgttcactctggaggacttaaacattaatatcaacacagaaatttcaacttttataggtacgcttacagggaaaggcaacaataaggaagataataaagatgagggaaattaggctttcaaagaaagaaccaagtttagacaaatgacagtccctagattttgttttcttctgtcttacatcaattggattctttatataatacagaaactctgaattttattttaacaacatgcttggatttagaggaagaaaaccaaagtcagcattggttaaagtgaattgggactaaaagagtactaggaagtaaagagaaatagatctttgtatagatatagctttagagtttaccacatggttctttttgaatatctatcctcacttctttaggcatttacacattcagtgtattttttgctttttgaagatgggttttcctgttaagacaagaacaaaacctcccccttcctttatcaggtctccatacaactcgtagaatataccttggtgtatgacctatcatttctcctaatcaagggggtttctcctgttcaaaactaatcttgatgaactttgatgatatccaaagcttttcttctcctgtggaaagaaaggcaaaacccctaccccaaagtaatgcatatcctgggttccatactgaggtcaatacatccttgaagtacaccagctgatttagttcagaagttttttctattgtccagtgtctttctgcagctgtttttcctttctcattagtattaagaaagtttgatgttgctgggtgttggtggcacacacctttaatcccagcactcgggaggcagaggcaggcagatctctgtgagttcgaggccagcctggtctccagagcgagtgccaggataggctccaaagctacacaaagaaaccctgtctcaaaaaaaccaaaaagaaaagaaaaaaggaagttttatgttagcaaagcatatgtaatctgtgcctggggggtctttgttccccatgcctgtttagagagcatttcctttaaagtgtgattagatctctcaattctgccttttctacagagttataagggctttgaactactttacttatttttcccaatttatattctgccttatctgatttgtttgcatcagggtagaatgtagggattccaaagattggtgtttttcttacaatacagggaaggatccaaattgttttctttatgaatctgattctctcagttttcggatagttgttgctaatcgtcccaaaaagtactacaagctccttgccaatattcattatctttccaaaaagaggaaatttcatcattagttaaaggtactataatttctgctgggtcccttcctgccagttgacaaagtcttaatttgccttttaacatcaaatcagagattgttttctatatatgtttttagttttttattctgcttatgtggtagaaatatccattctaatatgatatcttccctctgcttcagagattccctgagattccctcagatatcagaatctctgaaaggtattctctagatggtaatataatcagaatacagtctagttctggattcacgccctccacatgtgcttctagtattctttttcctacccattttaattccttttcagcttcagttgacaaaatttgtggactatttaagtctttgtccccttttagggtcatttttaagtttttcaaatcatgcccttctactccaataatagtctgcagctgagaaatctctcccagtaatttttgaaaatcattaagagtctggtaacaatctctcctgatctgtattttttgtgatctaattttttgtagacctgtcataacctaaataattgatagaatctcctctttgtattttttcaggggcaatctgtaatcccatatctggtgtcaaaagtgagataaagattaccacccatgggataaggatgccataggatatttttattggggagaaatcatttacatgagacatcgataacccagggtcagtgctctgagcatccagtctccactgctctccaagacctgaccggaaccctgagagagaccagacctgcctctcctcaggcctatatctcacaggcccatgcacctgtggccacgcccaaacaagtgtggtcagcaacacaggtacctagtaagatctcttcctacaggggactccagcttcgagggactggagtacattccctacacacagggcatttttttttttttatttttctctatatttgcacgttagccagttgattactatatgcccagaacaacttgaatgaggctttcagaaagacaatgccacatgcaaacacttgatctataggtgttagaataaagcttgagggggacctttcgtaggggaccttggcggattccatggcaggcgagggtgactgaggtgggggacaaacacacccggcagacagagcttaagtgagaagttttattagaaaggggagggaatgggaaggaaagagaaaagaggtaaagagacacagagacagggataggaaagaagagaagaaggagacggggaaagtccaggaaagagagcagggagagtgtggagggtgggaagagcagaaagagggtgtaagtgggtgggggtctttcttttaaaggggtcctttgcacctgcatgcagactagcactcatggaaccctggtctgaccagagtactgcctgagtgcattttgctaggtgacagcgacaggcctgcataatgcctgaatccttacaaaggtaccacagttttctgggtttcctgaaccaacttttgcataggcctttgtcttcttgggaaagtcccaggcaaagttcacataagggaacaaaaggtatctggtggtcagtcaaaggatggattaggctaggtgctagctcaccagagctaggccaggtgtcactcagcaggtggttagggctagttgctatcactacagtgccagtcggataccactacactccagtgtcttcacttcccaaggaattaaacctcagccattactttggacttggtggtgtaggactggatctccatttctataacataacaccaaagtaaagatgaaaaggaaggatgtcatcttcattacagagcactatgctgtccagtgttgctactgggacagagaactgtcctagcaaacatgtcccaacacagcagctctttcctgctgctcccgtcaacagcatgccttcccataatgtaactgcttgttcttaatagagttcaggcaccagaagtaatgcatatgaagagatgtgactggtatgtattcactcacaaatggatattagatgtaaagctaaggatagccaggctacaatccacaactccagagaagctaggtaaaaagagaggccccaagaggtacacatataattgagatcgcctgggtaaactgtgaggaggcatggtaaaagggagggaatggggcatgggaacatgagggatcaagaagactgagttgggggagagacagaaggggagatcaatgaaagagatatcttgatagagggagccattattgggttagggaaaaatctagtgctagagaaattctcgggaatccacaatgatgagctcagctaagactcctagcaatagtggagaaggtgtctgaatggtccttccccctttaatcagattagtgactgctcttattttcatcatcatagaacctacatctagtaactgatagaagcagtttcagtgactcatagccaagcactgggctgagctcctggaattcagttgaagagagggaagaaggatcatacgaacaaaggggtcaagaccatgatgggggaaaccacagagacagttgacctgagctagtgggagttcatggaaaaccacagacacagctgacctgagattgtgagagttcatagactatggactgacagctggagaaccttcatggaaccaaactagaccctctgaatgtgggttacagttatctgacttgatctgttgggaggggggcctggcagtggcaccaggacctaacccaggggcataaactggttttagcgggcctatccctatggtgggataccttgctcagcctttatacagcggggaggggcttggtcctgcctcaacttggtatgccagacttggctgactccccaagaaaagtcttagcccctctaaggagtggatgagagtgggaagggggaggtggggcacaggagaagaggaggaagggggaacttggattggtatgtaaaattaaaaatatttttttaattagaaaaaaagaacagatgtaacagtaaatgtcctggctgggcttttctgccctcagcaactacctgagtgcatccatattttactctccataacgtatcacctgctcttcttagtatgagccatatagcttatgcttgtacaaacaaccacatactctatctactctttcatagttgcaataggctgggaaaccaagcctttgaaagccacattgcatcatttctcttgttgctaagaaggaaatggaaaaacctaagttaggcttttccttagtatcttcctttgctattttatgtatattgtgtttaatctgataaactatatgatccaggtatttaatatatatgaggcagccaacagaggggtggctactttcttaagacctgatgaggagaatacatttggtgattactgaagtaaaagccatagatagagaggaataaggcacagtagccagaaaacattgtcatgctctcactaacaaagttagcagaagtctccaggttaggcactgggacttccaagggaaccatttggagctttgtgcagttgataagggagtgccatacagatcccagagatgagaagggactaaattacatgagttcagtgcaggagaacatacgactgcttcaaactcaggaacttaaggggagtctaagagcaacctgacgacaagaactatggtagatctgtcagccattcaccctgcttcccctgagcacagacaacaccactcctttgcatttgctttctatttattctcatttttggtaacttctactccttgtctgacatccaattataacctcaggcccacccaacaccatcttgtgtgcaagaccagcttcacacaggcacacacttccattggttccaggcacagggcatgcggaaatgctgcaatgagtgactcattttttgcataatagtattgcttttgtctgtgtgagaataaataggaaagccacgtttcctcataagctgctcttgtgaatagacaacgaaagagacaagaccttgggttcggtacttaggcatggtgcctcccatccgaatctctccggtttggtccattagggtccaagatgcaggggttccctcaggacccaggacacaggaacttgggaatttctttatacagcgttcgatgaatctctggctcaattcattgccaccaaaaagccagaattcattcaccaaggaagcatgggtgacatccaaggatgaaagtttaaacacgtcttgattgctgtagagggtccaagaagaaagcaaagtctgtgagtataaggctgcatgttttttcctacctctattatcttgaggggcagaacgttggcatcaagaaatgcaaagtccaggaatatagatgggcttatgctggaagggcaggaaggccagtgtgattggaggaaatgaggaagaagaataaatgtcaagtggtgaacaggggacttcaatcttacaataataacaaggaatatggtcagagttatacttatagattattctgatcatttttattttatttaatgactttgaggagtggtgaataggaggttttggatatacccacactggggatcagagaagaacctgtggagatggctctctcctttagccatgctggtcctgggtattgaattcagtaactcagttggtcagtcttggccataaaagcccttacttgatggaccatcttgctggcactattgcaattcaaacttttaaaagcttattatttaataattcaatggacatatgacacatatgttagttttagacactcttaactaccttcattctaccctccctcccactctagtagccctcttctcccaaagttcctctcctttcatttctattgtgttggtagtgtgaccgattgaattttattacagttgcttggatgagcatgggtggggctcatctactacagtgtgggcattaaagaccagtgtaaactcggggccaggaagtgggggttgtaggacaaagagatgaggtgcctcttatcaaactcacatggcctttggcttgacaccacctggcaataaattctttgtatccagcagggaagggaacaggttcttgattgtctctgctgctacatagaggatgttttctgaatggttgacttgggaagaccgaatgcttgcaagattttgtatcacttcattcaggcgggactgggaacctagacgggtttataaggaaacatatagggaacttctaaggaaagaagtaatggttagacatcttctggctgggggctctccaatggggtgggaagtgtgacatttaagataaaagcttggtcatgatcatgctaatgcttctgtgtgaatagccatacagtcatggctggcataatgctctctgtcttacaaaaatgaaaccatgtaagggaatgaataattcatagtcattttgtgagtagaccaagactggaactaagtttttttacgctgtataattgtgtagttttgaaaatcagaggataagctataaaatatggtagtcagcatcttctgagtcatgtctccaatgtggtagattattgaagcaatgatttagaatctaaccaaaattccttgtatctgtcccctggaatagttcccttatataccctatctgaccaatgagaatataaacttatgcaaggagagacttaacagtgttagaccttgagactttttttaaattctagttaccttgagaccaactgcatataaagtagcctaggctagctgaccagagacacatggcaccatcatcaccaccaatagctggcattgactgacagacagagccatcatctacacatgtgaaggaatctatggcagagcaacatgtactgagttctccaatcaacatataatacatgaacaaatctaatagagaccagtaatgagccaaattgttggttcacttcattatgagttttctattacagcaaatgttaactgactacccctctgttttagtttcacacagttgctgatacaaaacaccataatgaaattcaacttgggacaaagggtttatttgggtttacttccaggtcacaatcccaccattaaaggaaatcatggaaggaactccagtcaggagctacaaaagaactgcttgctggcttactctctggatcattcacatgctcacattcgactagtttttttacatagtccaggaccaattatctagggatagtactatagtggtctagccccgtctctattaattagcaatcaaaacaatgccctacagacatgctttccaagccaatctgatcttggcaattacccaactgaggcaactctacccaagtgattctagcttgtgtcaagttggcaattatggataaccaggacacccagttaaatttggttcttcctgttcaaactccagtgtctcgtattttaagaactcctattgcgttgatatgtatatgcaaagaatatgatctcagagaggacaatacacttcttaaggatcagatggagaggagcagatagacaccaacttagggagtcttactcaaaggccatgcttatcaacatgttgttattggcaacctgagaggtaccctgtgacaccatgaactgtcagtactattacagacatgaggttccagaggtgaagctgcactcctgcaaccacttttcctaaggattctggatacatctataaaacgtgccacacatttctgggactagggattattgtagtggttggtctcagttgtcaacttgacaggatttctaaccatctaggagatatacctctggaagaaggttgactgaaggaggaagaccagccctcaaactggttcacaccgtccaataggcaggccagatgaagaagggtgttagcaaaaagcaattccccaaattgtctattgactagcattgctgctaccatcctctgctgatatcatatttggtctcttcaaccttccagagtgagcacaatatcataactccccaggaaatgtccagtctatcagcaacaaactgcgattgccaaagtgcacagctttgtggaccaggtagttaccaagatctctgcctctccaatgtgcatatagctactattggtctacatagtcccttttatataagccaagctaataaatacccttttattgtatgtaaatatgcatgtattctgtaggttctgttcctctgaataactgtgtttcatactattctatttacaagtagatttaatgatgtcatgtctgactgaggacgtggaacttagtgcggggagcatagagatcttgagagacaagacacagaagggattgaacccacttcccattgctcttactttgaatctgcaaatgctgtttccagttgatgacttctggggagtccaggaacttctgacaattctgggggtctttagagaagatttggtaagtattggtgtagtgatcaaggtcatttgccatgtcctgttagcatggagaaaggacagataatattcattgtttattgtttatgattgcagtgctagttctgttacactttaatattttacatattattttaacattttatgtgtatgggtgttttgcttgcatgactaactatgtacctcatgtatgcttagtctcagggaggccagaaaagggcattggttcttctggaactggagtcacagatgatgacgacatcgtgtgcatcctgagaattaaacccaggtcctctggaaaagcagccagtgctcttaaccattggcccatcatagactctgattacacaaactgaaatgtttacaatgccattaggagatatactgagagtgtgtgtctttgtgtgtgtgtgtgtgtgtgtgtgtgtgtgtgtgtgtgtgtatgtgtgtgtttgcatgtgcaggtcaaaggagaactttgggcatttgggcatccttcctgaggtgtcatccacctttttctcttgagtcaaggtctatcattggcttggaacatgcctaataagctagctgtctggttaatgagccccagagatctatctcatctcctcagcactaaagttacaagcacacaacagcacatgttatttttttcaagtgagctctagagttcaaactttggacctcatgctttcataccaagcactttacccactgaggtcctgccccagcatacgcaatgtgtttttatggggccatttccatatatttggtccataacaaactgatatgccaatgtgtaacatatggctatatatgtatatatgtgtcacatgtataaaacttgctaattaaaatatacagtagagaaacttttggtatgaacactttacatctctcactatgtcagaataaaatgtaattagtcactatgctgtgcaatagatctctttaacttacacttctctttaactgtaattttgcctctttcatgagtattaccccaatttcccataccaccatcatctcttgaaactactcttggcttctatgggatcaactcttttttttaattattctataattacattttcccctttcctccctccaaaacctccatatatttctcccttctctattttaaattcacagccttttccccattaattgttaaaacatgtacatatgtatatggatatacaggtatattacaaaatataacctgggtaagattttttagattctacatgaatgactatagaatcatatttgttcaccctggcttcttacctgttcctggggacggacaaccactgtgttaaattcaggccacttgtcaactagggcttttaggttgaatgggtttccatggttcatgtgatagacagtcccataaacctgcaaggaagtgagatggtgagtttattaagaagaatggaaacgtgccttatgtgatcaggacagagatttattgctatgaaattgtgacagttggtgaagacaaagagccaaggaagaatctaggctaaacaatctcaggcaatactttttttcaacctcaattgatgaaagttttgtcttcaaatatgagccatagaatacatagtaaagtgttcagacaaagaaaatgaatgatttctttatgactattccagacttccattagaagaaagtgtgtgctttagtaagtgactaaagagttaagtatctccttataaaatctgagaagctgagagagccaccttacctcactccatgggctcaacaaaactgctgggaaatacccagagatttctcaaaatatttgacattcacttttaatgtaaggaatagaggaatatacattttaaaattctgtatcacggagcatgtaaaaaacattttatccttcagaatttatgagaatagttgttcaacataaaaataattcaagctagttgtccatagagtgtcaaataatttaatttccaagaaaaaataaaaataacttgttcctgcttggggacaccagacactgggggtctgctcataggatctgaactcagccggcaggatgcaacacactcagagactgccaaggcccctgtaacactcctgcctccatccacaagaagaggactgacatcagagtattggaactgtttgcatctaccagaagggaaccttggtcccatacccaccaggagaggaagagactcctactacacccactggaaaaaaggatgggaagaagacaatataaaagcatattcaacaacagaaaaaccaatatgacaacaccagagactagggaccctacaccagcaagacctgaacatcacaatgcagatgaagcagaagaaaaatgaccttaaacacatcttcatgaaaatgatagagggcctcaaagaggatatgagaaaatcccttaaaataacggaagaaaaaacaaaccaaaaaatacaagacatcaacaaatctttcaaggagacagttcaagacctaaaaactgaaatagagacaataaagaaagcacaatctgagggaatgctggaaatagaaaagatgggtaaatgatcaggagctacagaagcaagcataaccaacagaatacaagagatagaagagagaatctcaggagttgaagatacacgaggagaaatagactcatcaaccaaagaaaatcttaagtccaacaaatctctaatatgggatactgtgaaaagaccaaacctaagaataataggtttagaagaaagtgaagaaatccaaatcaaaggcacagaaaacatattcaacaaaatcatagaagaaaacttcccccaaactaaagaaagacatgccaatgaaaatacaagaagcctacagaacaccaaatagactggaccaaaaacagggtctcctctccacatgatattcaaaacaccaaacatacagaataaagagaaaatattaagagcagcaaaggaaaaaggtcaagtaacatataaaggcaagcctatcagaattacacctgacttttccatgaaaactctaaaagccagaaggtcctggatagatattctacctacactaagagaccacagatgccagcccagactactatacccagcaaagctttcaatcaatatagatggagaaaacaagatattccatgacaaaactagattaaacaacacatatccaccaatccagccctacagaaagtactggaaggaaaactccaacccaaagtagttcaatacaaccagaaaaaatgtaggcaatagataaccccactttaccaacagccaaaagaaaaaagggatggaaacccacacataatttccccaccaccaccaaatccaaaacaaacaagaatgaacaatcaatggtcattaatatccctcaatgatagtggtcttaactagcccataaaaagacacagtatagcagaagggataagaaaacaaaatctatccttctgctgcatacaagaaacacacctcaacttcaaagacagatggtacctaagaattaaagattgggaaagattttccaatcaaatagacccaagaaatgagctggggtagcttttctagtatctaacaaattggactttaaacgaaaatcaatcaaaagagatgaaggaggtcacttcctactcatcctaggagaaatccatcaggatgaagtcttattactgaacatttatgccccaaatacaaaggcatccacattggtaaaacaaacattactaaaactgaaattacacataaaaccacatatacttatagtgggaaacttcaacaccccactctcaccactggacaggaagaccagacagaaacttaacaaagaaacaaaggaactaatagaagttttggcccaattgggcttaacagacatgtatagaacattccatccaaacacaaaacaatatacttttgtctcaacgctacatggaaccttctctaaaatcgaccacatactcggcaacatagaaaacctcaacaggtacaaaaaaattgagataacccctgtatcttatcagaccaccatgctttaaagttagaattcaataacaacacgaattgcagaaaatctacaaactcatggacattaagtaatgccaaattacacaactcctgggtcgaggcagaaataaaaaaaaattaaaaatttcctagaattcaatgagaatggagacacaacatacccaaacttatgggacactttgaaagcagtgctaagaggaatattcatagttctaagtgcccacatgaagaaacaggagaataatcacactagagaattaacagcacaactgaaagctctagaacacaaaggagccaatacaccccagaagagtagacaccaggaaataatcaaattgagggctgaaatcaataaagtggaaactaggagaacaatacaaagaatcaatgaagcaaagagttggttctttgagaagatcaacaagatagacaaacctttatccaaacttgccaaacagcagagagtgaacatgcaaattaataacatcaggaatgaaaaggggtgcataacaagagacacagaggaaatccagaaaatcatcaggtcatacttcaaaaacctatattcttcaaaatgagaaaatctaaaggagatgaacaattttctggacagatttcacttaccaaaattaaaaccagaacagataagcaacttaaatagacctataacccctaatgaaattgaagcagtcatcaaaagtctccgaaccaaaaaaagcccaggaccagatggcttcagtgcagaattctatcagaaatgcaaggaacatctaacactaattctcctcaaagtattgcacacaatagaagcagaagggtcattgccaaactcttttttcaaggcttcaataaccttgatacccaagacacacaaagacacagctaagaaagagaactacagaccaatattcctcatgaatattcatgcaaaaatactcaataaaacactggcaaatcgaatccaaaaacatatcagagaaatcatccaccatgatcaagtaggcgtcatcccagggatacaaagatggttcaacattcaaaaatccatcaatgtaatccaccatataaacagactgagaaaaaaaaaccacatgatcatctcactagatgaggaaaaagtctttgacaaaatccaacataccttcatgataaaggtctttgaaagatcagggataacaggaacatacattaacacaataaaagcaatatacagcaagctgacagccaacatcaaattaaatggagagaaactcaatgaaattcctctaaaatcggggacaagactgtccactctctccatacctcatcaatattgtccttgaagttctacctagagcgataaaacaacaaaaggagatcaaggggataccaatcagaaaggaagaagtcaaacattcactatttacagatgatatgataagtgacccaaaaaaactctaccagggaacagctgataaacgccttcagcaaagtggaaggatacaaaattaactcaaaaaaaatgagcagccctactatatacagatgatacatttgcagaaaaagaaatcagagaaacatcaccctttacaatcaccataaacaacataaaatactttggggtaatgctaaccaaaaaaagaaaaagacctgtaccataagaattttgattctctaaagaaagaaattaaagaagatactagaaaatggaaggatctcccatgttcttggataggtagggtcaacatagtaaaaatggcaatcttgccaaaagcaatctacagattcaatgcaatccccattgaaatcccagcacaattcttcacagaccttgaaagaacaattctcaaatttatgtggaaaaacaaaagacccaggatagccaaaataaccctgtacaataaaggaacttctggatacatcaccatccctgacttcaagttctattacgaagctatagttctgataacagcttggtattggcataacaatagaaaggtagaccaatgaaatagagttaaaaacaccgatattaacccacacacttaccaacacttggtttttgacaaagaagctaaatttatatgatggaaaaaagaaatcatcttcaacaaatggtgctggcataactggatgtggacatgtagaagactgcagatagatccatgtctatcaccatgcacaaaagttaagtccaaatggatcaaagacctcaacgtaaatccagccacactgaacctcttaaaagacaaagtgggaaacacccttgaattaattggtacaggagactgcttcctgaacattacaccaatagcacagacaccgagatcaacaactgataaaagggacctcctgaaactgagaagcttctgtaaagctaagacaatacagcatcccacagactgggaaaagatattcaccaaccccacatcgaacagagggctaatttccaaaatatacaaagaactcaagaagcgagtctccaaaacaccaaacaatccaattaaaaagtaggttacagaactagacaattctcaatagaggaatctaaaatggctcaaaggcacataagaaagtgttcaacattcttagccatcagggaaatgcaaatcaaaacaactctgagataccattttactcctgttagaatggctaaaatcaaaaacaccaatgatagtttatgctggagaggatgtgaagaaaggggaatactcctccactgctgatgagagtgccaacttgtacagccactttggaaatcagtatggaaaaatgggaatgagtctaccacaagatccagcaattccactcttaggcatatacccaaaagaagcacattcatacaacaaggacatctgttcaatgatgttcatagcagcactatttgtaatagccagaaactggaagcaacctagatgcccctcaactgaagaatggatagagaaaatgtggtacatttacacaatggagtactactcagcaggaaaaaaaaacaatggaatcttgaaatttgcaggaaaatggatggaactagaagaaaccattctgagcgaggtaacccaatcacaaaaagacaaacatggtatgtactcactcatatgtggattttagacatggattaaaggattaccagcctacaatccacactgccagagaagctagtaaacaaggaggaccctaagagagacatacatggtcccctggagaaggggaaagggtcaagatcccctgagcaaattgggagcaagggagaggggggagggagctaggagaatgagaaggggagaagaggaggggtgaggaggacatgagggagcagaaaggttgagtcaggggaagaatagaagaaaacaagaaaggagataccataatagagggagacattttaggtttaaagagaaatcaggcactagggaaatgtctggagatctacaaagatgacaccaactaacaatctaagcaacagaggagaggctaccttaaatgccctcccctgataatgagattgatgacttatttatatgccatcctatagccttaatccagcagctggtggaagcagaagtggacacccacaactaatcactgaactgaattagaatccagttgcagagaaggacgagtgacgagcaaaggggtccagaccaggctggtgaaacccacagaaacagctgacttgaacaatggggaactcttgctccccagactgatagctgggataccagcatgggacagatccagaccccaggaacatgggtttcagtgaggagacctcaaaaatctacgggacctcctgtagtagttcagtacttatccctagcataggtatggactttgggagtccattccacagcgagggacactccctgagccaaaacatatgggggtgggcctaggccctatcccaaaacatatgatagactctgatgacccctatggcgagcacaaaggatatatgataggtagggttttagttgggggtggtaggaaaggaggggagggagagggaactgggattgtcatgtaaaacaatcttgtttctaattcaaataaagaataaaatgaaaatgaaaacaactcaagctagttgtccatagagtgccaaatgatattattcccaggaacgaaattgtttcctgcccgggagatttcctgactcttgtgcattaccggcttacatagaatgtcttgtcttatatcagtggactttactaggattttggattttagtttgagttgaaacagatttatttggatggtaaattatagataggatttgatccctaattagcttattattaataaacgaagcaatatacaaataaaaggatgcaaacatttttcttttttataaaaatggagtagcaaatctgctagagaaagaaagaaccgaatctactaatcttatcttaaattcattttgtagaaaacttgtggaatggcacaaatctgaaaatatttttcctgtaaggcacactcatgtatgcacacaaacacaaacattcataccttcacacactaacatgggcacaaacatacggagaaatacacaaacaacgtgtgtgtggagatcagataataactcttaggagttagttctttcctgccaccatgtggtatctggagatcagatccaggctgtcaggcttgcagacaagcacctgtctcctgagcagtcttgcctaccataatgttttaattacttctttatatctccacattctttttttatagaggtaaaatctcactatgtatccctagctgggccggaactcactatgtagactggatggccttgaactcacacagaaccacctgcctcttgacttccaagtgcagagattaaagtatgcactaccacacctgactatctccatattcttgaccaatgacacagatgtagtggcaaataatgtaaagaggtgatgtaaattaaataatagaaatatgaaatatggattggctcgaaataatgccacataggggctggaaagatggctcagtagataaagcacttactacacagagttctgatcctcagtacccatacagaagtgtaacatgataaataaaaaacccagagacagatattggggttcaaaccaagtagatgatcagaaaagcaaagcaaccagccactagttctcacctctagctcaggctgaaagggctgatccaccaacttttcaccaggcctcaaactgctgcctctcctcagtgtgtctatagagaatcctaagactgaatgtcttcctatactcaatatggctggagaatgaatgcctgatactgactactgaagaccctgaaatcccaacctttatagtgttgggattaaagacatgtgatcccaggtgctgagatcacctttgtgttttctctttaggactggatcaatcttgtgtagatctgggtggccctggactcacagtgatttgtctacctgttaatcctgagccctaggattaaaggtctgtaccaccacctcctatcttctggctcctggaattaaaggtgtgtgtcaccactgtctgatctctatagcttaaggctgactctgctttctgaatactcaggcaagattaacaaatcataaataatacttcaccacagaggggtgctgacagcctgttggcaaaaccattgtttgggaggcacagccaagggagcttcctggacaacctgactagctatactagctgaatatgtgagctccaagttcaacaagagaccctgtctcaatatataaggtgaagagtgatcaaggaagacacagaacatcaacctcaggcctcttcatgcatgtatatattctattcatacatgtatacagcacacacacacacacacacacacacacacacatgcaggcacgcacgcatgcacacatacacaaaaagagtgaggcataaatgctagtcactttttcacatccattttctccttgctgccctcagaattttctgagatcacctttaaggattcaggaagatacttcctcaaagatttctccagcatctgcagcatctgtgcaccttgcagttggacaatcatgaggacactttagcctagagaaataataaatggatattcatcaataacagaaacaaaagtagccggttgtatatgattgattagccaaacttccccttcactaacatcctcaccagctctgagaaaacgcaagacttctctctgagcttcttggttctccttctcaccaatggactcaccttacatgaacaagtgcatcttattcttttgagtttcatgtatgctggtgtctctcctggcatctctagtaatggtgtttcacaggaagttgcctagcctctgtgccttggtttcataaaaggtagaggggataatgagcaccatctggctcatagaatgtctgtagggctgaaatgattgactaacatgcagcatgtttgatagagtgttggtcatataaacaatactcaactgtattgtttattttattgctaatgtttctcctcttccttctcctcatgtgagttaatattgcatgatgttttgatgcaactgttttattataaggtgctttgacatgttttagatataaacaataaacctttataaccaaataacattccagctactactctcaccctatcatcgttttgtggctttcttgtttagttccctctctaagcatcattcttgagtctatgttacacattagaaaatactatgtaaggtcctgaaagattgtcattgagaaaagacgcttgctgtcaagcctgataatttaagtttgatccccaggatccacatggtagaaaacaagagaaccaattcccacaagcaagttctccttttacttcaatctgatgtcaggttgtgcataacacacacacacacacacacacacacacacacacacacacacacacacacacaaattaactcatgtaacttttttaaattaccaggtagtaaaagtagcattttaaaaatggactcagtacgtcatgttggtcccacctaaatcttccatagcaacccaactatgcaaagagaaaagtctgtcaccttgttctgttatcaaatagtgatattcagaatggagaaaaataatttctgagttaggaaaaaaaagacggtgctctggaaaggattagcactgaaactggcctagccatgtatgagatgtcctgctccaagccagagcaaggcaactgtgtgctttttaaaaacaggggaaagattttctgcttctgggcaatagtgtctggatttatctacccacctaaaataatcacagttttcatattgttctagtctgatgtgggtcattgtgataaaaacactccaaacaaaagtaacttaagcaatgaaaggttttgtttcagcttccaagtggcagtcaatagctgagggaagtcagggcagaaactcaagcaagaacttgaagcagaaaccatggaaaaacactatttgctgttttgctaacaggctcatgctttcttatccagcccaagaccagtgggtgctgcccacagaaagatgccctgcttcatcaatcaacaaatataatttaccatagacatgctcacagcccaatctgatctaggcaatttctccctgagattgctttaggctgtgtgaagttgacagtgaaggggaactaggacacataagtttccagtaaggctctggtcttggagagaggaaagaacaagaggctagaaaaaaatggtttcactggcaaaacctcttgtctaccatgttccaggccctgggatccatccccacaaccaactgccatcagcttaatttttgaaggaagtctccagtttgagccaatgggtgatggaaacagaggagagcaaagcatctcagctttgagtatacaaagattggagactgaggaggtcaaagtagtgtgtgtgtttgtgtgtgtgtaagagacagagagacagagacagggagacagagacaaagacaaaacagacacagaagcacagagacagaggaaagaaaatgggagaaagagagagaacattagctgaaacagcaaacaaaaaccaacctggagtaaaaaaaaaaaagatatttttaaaagaccaatatagtactcatggaaatgaaaacaatgcaatatttagcataaacaacacacagtatgtgatcacctgaagattaaacagtgagagagaaataccaatgaagacagagtgtcagaagtatccacagtggagcacatggtgagggggggatgtcacaagatcctaattgttaagatagggattagaaagatggttcagcaattaagaacacttgctgcttttccatagaacccgaatccaagtttccagcactcatcagctcacaattgcctgtaactcccagctccaggggatctgactcctttctttgacctccatggacccagactcatgtggcacataaacaaacacatctcagtgaaaataaataaataaaatgttacttatctacaaactgatgaaatcagtcatgaaacagttcagattccatttgtgggaagggacacaactgatgaggaaagtcacctaagtgtaaaccttactattaatagaaagctaaagttatcaagacagagtgacttggcataagaataaacaaatagatacatgtgacaaaatcaaaagtccagaacagactggacagttgtgtaccaaagttccaagaaaaaagccatgactatattaaaaactctacaaggctggatgactaatcggaactctgtggttgtgaagaacttagagccaaaattatcactagctatcttcagaacccttgatagccacatatttctcacctttatattgtatctaagattcttttgatgtttcagctgtcaggaaaacctttggggatatattaacttaggagacaactaacatctaccaacccaaaagctaaggttgccataagacctatagctttgctgtgaccaacctccctgaggtttccacccacttggaattaccttaatttatgacctccttttggtgtatgactttagaacttcatgaagtcatttccatgttggaacgtgttctggggtagcctgaatccatgttcccaggttgtggatatatatatgactcaagaataagtttccttttattccctttgagatgacagctgtgtttttcatggtcaatgtggtcacttggttttctatgaagacatctaagcaatttggtggaggtgcgacactaaacttcttagaagctggtgcagactgctattcttcagcaggaagggtgactactgttaggctcaggcagtgataaatttcccactgtgggttttaggaaagactaaatctatttgccctaatacttgtttctgtctcctgggtcgcttatctaaacaaagattcctgttttattttccataatttgttgtcttagattcttttcctgtcactacaataaactatccagacaaaagtaactgaaggaagaaagggtttgtatgggctcactgttcaaggcacagtccatcattctggggaagtcatgacagtaaaagcttgaagcagttgatctcattgcagttacacttaagaagcagagaaggggaaaaaaatgcacagtgctcagctctttctccgtgtgtacttcctaggattctctgcctaggagaaatggtcccatacacagttaaggtaagtcttcccacattaattagcatcatcaagataattcccacaggcatactccgagacctatctcccacatgattctagattctgccaagttgacaacagcagttatcatatttaaaaatttgagaaaacataatgctttaacagacaagtaagatcagacaaggccagtaaacggccataatggagtcagaccaagaacagaacaaacctaacatcctatccaatattcgagcttaagcatagaccaaataagtcataatctgtaaaagtagccaacagtcttgtgtctggcaactcagttcacaggcagttattacttctataactctcctgattcatgaagaaatgtattagacagaatcaacctgagttctggcagggcacaacctggaggcatagcagtccccttgattgctgctccaaagctctaacctcaagccctcctcacacacttgctaaggcagactgggttccgtcatggctggctgtttatcttatggggacagagaggaaacccagttttatcagattgcagattatgttcccggtagtcaaaggctagaagtttctgacatacttagtcactaaagaatcaggtccggctattcactttcacccaaatcttggcattacctccttttcatgtgttccatcagcactgctggtcacatcaggagttacgtgagaataaaatgttatgtatgttaaataaataaaatagctgtatgttaaaaagatatgtgccaaattgccaagtttcttgaatggtgtagtttagaaccactttttaggatgtacagaaactaacaaacaagcatggtgcccaataaacaagacagattcaaagctatctattgtgagatttttccaggaagcctgtgacacactatatccagtagcactgagcaatttctaagtgaactctggagttgctgaccctgccatgccaggaatggaaattaatctgacaaaggcaatttaaaagaaccgaacagaattttacaaagctatgcaaacacaggtacatgctaaataggactccaatgtttgtgaatagggaaaggaaatgtaaatagcaaagtacaataactctaaatcattaacgccatgactacaggcatgatgaacagtgaatgtgggtgtggggaaaagcattaaagtacaatcagaacatacagggcataaaatagcttttaagtaacatgcaaagaaagagtttaaaagaaaccataggtaaattaaaagttagactgtggtagtagtctatagctgcaacttttgcttgctatctgagtaataagtaacatcactgtatattcttgctatctttctaactttaaggtcaacaaccctcttaccagtagtgggcagagaaacccacctatcctgtaatacaactgggaagactgagcgcagtggtgtagtacctctacacagtaggttctgtattcacccacttccaaaaaccacaaactatttcctcatttactagaagcaatatctgagaacttttcactatattcgacaaactagcttttacagaatacatgcgtgtgatatgttgcttcaagtgaaattactatttttcccatgggtatttttggtacatcactcattatgatcattttgatattattcacttgagaggaggtgtaagatggttaagaaaaaacacagagacaaacattggggttcaagttgaagatcagagaagcgaagcagccaagccactctatctcttacctctacctcaggcgtaaacgggtgatcctgtctccacaaatcctaagagtacaatgcctccaaaaagcctcaaactgcagtcctctgagtggtctccttcatcttatgttcttctcacaacctagccatattgctcctgtctccacctccccagtgcttggattaaagacatgtgatcccaagtgctgagatcacctttgtgtgagcattttgttctctttagtgtagctctgtgtggccttgaactaacagacaaattcatctgcctctgtctcctgagtcctgggattaaaggtgtgtaccaccactgcctggcctctatgtccgtagttagctttgcattctgaacccccaggaaagctttattaaatcataaataatatatcaccacaaggaagaaaatgttaaaaagcaataatgaccttttacaaaccatgttgctttgtatatttaaggtaaaccatatggtcttatagaacacacacagagtgcatagctttatattaaatttgtgggtactgtgtatgtttgtatgctgccagactgaagcaattaacattgtccattatgtcaataggtattgagattttgtttgtttatttggtgaacacagatgacaccatgggctgggaagatgagtcagcagacagatgtgcttactacacaagcctggtgaccaatgactgatctccaaaacccacataaaggtgaaaggagagaatcaactctacagagttgtccactgtccttcacaagagggctgtgatccatatgcctccaatatcaatagtgagagatagtagatagataaatgagagataacagatagatagatagatagatagatagatagatagatagatagatagatagctttttgatagattttaataaatagctaaaacctactcattgcctatgcatcccacacaatcattttatgacctaaagttcttatgttgttcctttggcctccagactcatctgacaggtctgatactctgatataaatcctcacctggaaagctgcctccacaagcaatctttggaaaaatggacttctgggaggagaatgttccttctgatgcagcaggctcagtgggaacctgaagagtgagtggactttggtgtgtctcttcagaaattaactgagctgaggctgaaaatatggaccttgcactaagcacgttgacaaaaacttcttgttgtcagctctagtgaaagctaacccttccctccttcaatgatctcatgctgtgggaactggctctgcaagatgaggctaacatttgccctcttctaaacatcaccttgctctttgcccgacttgacattagtatgccaaacaaaggtacagtaagccaccagagtggaaagggacacttagggaatcaataccttcttcctccccattttcaccatcaaatatcagtaacagcacatgacaggaggcctgattcatagagctcaatatcatatctctttttcatgaataacataaagggaaatgacttgcctgcagtgttagaacagtaaatatccctttttccatggcccttgctgccactgaagaccatgtgggtggttcttggtctgtgctccctcaggaggccatatggatgtccacagtctggattacgaccaaaggccatgtggatgcccatggtttgtgctgctacctgaagtcaggttgatgtccatggcctgtgttgccactggaggccatgtcaatgtccatggcctgtactgtggccaagggccataatggtgcctgtggtctatgctgtggccaagagttgttttgatgtctgtggtctgaactgctgccagagaccatgctgaggttcatgtctcatgctaatggatgctggaggtcgtgtggatgtctatggtccctatgctatcaccagaaaccatgtagaagttcatgatccatgctgccattgactgtaaatgttaaggaagttttttcagtggtatctattatcgcagactcatacttgagaatgagagacacttctgtgacattctctttccccctactcgcacctacctccccaaaaagaaacagtagagacaggaagtcattgaagagaactcttaatctcattttatggagatggcttctgtggttaagataagaaagtattcggtccagagatgttttattcttttttttaaattccacaaaggagctgcattatgatattcccataatgtgtaagatacattttgactttccacaacagtaaatggtattctatatttgcctcctccattaatctttcttatctcccttccccttaccctctttcctcatctgaatctcttataatacttctctttcttttctctcataactgtcttccacatgacagaaaatacttgtacttatgtctgtgagcctgcgtgttgcactgatgatctcatccagttctgtacattttcctgtaagtaatgtaatttcattcttctttatcactgaacaaagctctgctgtgtgtgtataacacattcccttcatccattcatccactgatggctacctatcctgattcataccttggctattgtggatagcatagtggcaagtataggtatgtgggcatctctatagtaagctttgatttctctgagtatgtctctagtatggatggaacacatggcattgtttttaatttctttggcaaacatccacattgagttctatggtgactgaatgtttacattgccacaagcagtgtataagagttccttctccacttcattgttgccagcattttctgtttgagttcttaaggctagccattttgactggggtaagaaagaattacaatgtaactttgatttacattttcctggtagcagaggcttttctttctaaacttccaatacacattaacatttgatccacctttctaaaaacagacaagactaattgagaacttatttttcagtctcaacttcactgtgtgaaacaactaaggaaggtctccagattcttgtgatcaataccattttcccagctagtcgtgtgttttgctaaggaaagaaaagatgctcaaactaggacaccagagaaactagcagctattacctacacagaaaggcaaaagagtttgtgtgttcttacagtcaatggactaacactgtgcaagatagcacatatttttctctatcttcctttagaattctgtgtgttcttggcacattgattctcattcccatcacttgtttgaagccaatgtgattagccttgactttctccacaacaaaactccactgaattgttttgttaccatcaacagagtaaacctatggattccaaaaatcacaaaggctgactacaacaaaggagtggggtcctcctttaccccaattacagaagcagacccctcaagttctgtcttcttcagcctacttacttgtgaaaattgtggaaaattatatggatactttaaaagaaattaaaaaaagaactatcatgttatctgtaagtcctttctgttctgtgagtccttctttgagacgtataatacaattaagaccactgtctttacttcattaaggcaaactctttgggggattattcataagttgccaagatagggaaataacttaaatgtccgctgatggacaaatgaaagcagaaactctggcatgaaaaaatacatatcacaatgttatcctttacaagaataagttcttactattttccataaagtgaatgaacttgggcaaatactgcgtgagataagctaggcagagaaaaactaacacataaattcacttagatatggaatttaaaaacacaactagagaacaaaatgctagttaccaaggttagtgatgaggtgagaaatatattatgtgtatcagaggattacaaaattccccatatattaataagaagatctagagatctacttatagcatgaatatcatagtgacattgaactgtatatgagagtcatactaaatgagatttttagacactcaggtgaaatcaaaataaagtaaatatgtgaggtgatggatgtgagaatttgtttcactatagaaaacattgttactgtctatttttatccccaaagcctcatgttgtacacatttaacacacacaataaattttcttaaaaattagtcttcctgccgggtggtggtggcgcacgcctttaatcccagcactcgggaggtagaggcaggaggatctctgagagttcgagaccagcctggtctacagagctagttccaggacaacctccaaagccacagagaaaccctgcctcgaaatcccccccccaaaaaaaacgatatccaactacaatcatttatttattcatgtaatatttagcatggttattaaataggaatcaaaggtctacaagtgaagcaatcagttcaaagtaccagttgatgaagaacactccagctcctaaacaaaggaaagagtgcgagaggaaagcatacactattcacaagtcagcaccataccctgacacaactgatcatgggcagtaatccacacgaggacactaatatgaagctgaatagaagtgtcactggcacccagattgtgaagaactaaacaaagtcggtggctgagtggagaggtctggccatgcttcatctgctgtatctgaaaggcagtatgagggtggggactgtggtatactgttggtcattcacactgcttccccagaacccaaacagtgcccacacctttatcgttcattacaatatgtattttctctatctccaccacccactcctccagctttattatagcctacccaacacagcctaatattctgtaccagagttacagaggtacacaattccactgattccagtcacagggcataggaacgtgctgcagagtataactcattttctgtatggttttgttggctctgtctgcatgattatacacagggtagccaagttcatccataaccagggtctgagtatgaatgatgtgagagatgagaccttgtgcccggtaatcaggcacagtgcctgccattcgcatttctccagtttggtccatcagagcccaggatacaggggtcccttcaggtcccagaagacatgagctaggaaaggtctggatacagtgctcaatgaatctctggctcctctcgttgcccccaaaatgccagtatttatccaccaaggcagcatgggtaacatctagtgatgagagtttaaacatctcttggttgctgtcgaagaaaaaagaaaaagagcagcctaaatatcatgcacagtgaaatatttgtcccttcccacacaactctaccgtgaggtgtgagacctgcagtgatggtatgcagtgatggctagccgtgtgacagcaggcagctaacttaatgcccctctgtccccctgttgtcctctttagaagggatgagttaatagttattctatcagaagacagaaattagtggtataagagcttttgtcttacaaatacctggggctgtgcaacataaacaactaaatcttcacaaactcagtgctcttctcaacatagctgtaacccacgcacccacagaaaatagagcagatgacatcatatagataagaaaaatggacaaataaagaataagtactcaaaagcatacactaacaagcagcaaagcaagactttaaaatcatagaatcgcctctctctctctctctctctctctctctctctctctctctctctctctctctctctgtgtgtgtgtgtgtgtgtgtgtgtgtgtgtgtgtgtgtaagacgttggttggtttcctcagtcttgctcagcctcactcactgaacctggcatcatccattcactagctgtccagtaattcccctatgatcctcttgactctactctatcagcaacaggataacaggcacattattacatctggcttcttttgaatattctagggatcttaactcttcgggcatgcatgggaggcactttatagactaagccttcttcctgaccctcgtatcatgaaatcgtccatgctggtatctgagagtccttggctgccatattgactgcaagataaggtagatgttcaaagggttaacagcatggcgtataacagtgccttctatgaacactatagtgaaaagactcctgtatttttttctcagggtgcataaccagaggatccagagtcttgtcacaaccacccccttcattatcctcatcagagccactccaccatcagagactattttctgctgtgaaccacaaaaaaaaaaaaaatgcctcctgtcctgactgtcccctgagaagtggagccagtgctactctgggtgagaaggtgctctctgagttctaatgtgctttgcagtgtgagcaaagttcttccaggcaccctgagccagagggaaggccccccgattgagcatgggcacatcaagttcccatcggttttcagtgctgctctgtgctaccctgcaaatccgtggaagaaaacacattaatttgcctaaatgttcttaattggaaaacattttctctgtgaaatggattgattaaacacatagttattaagaatcaacataaacatgacatgctaacatggaaggggaaagttttcattgagccatacttataaagaactacaggaaactaacaatgttgagagcaggagaaatagtcttccctagggatgagcttcctaactggttagccaaccatattggtcagccatgaaatcatatacatacaagtaacattaaacaggctgagcatggtgtgtgtgtgtgtgtgtgtgtgtgtgtgtgtgtgtgtgtgtgtgcatatacacacacatgtgtaaaaataacagttaaaggaaaagagtccataaattttaggagcaagggaggcataagatgaaaaggtgtaaataacataactatactttaatttctaaaaccagaatttactaaatgccaggtactcttctgcctattgaggatctctctctttctctgaacaacacaaaaaggattcttgctctttttaaaaagaatttacatttatttattcatttatttatttattgttaggacacacctgtgaaggtcatatgacaacctgtgatagtaggttgtctccttccaccatgtgggtcccaaggattgaactcaggtcatcagctttgaagcaaatgcctttgcccactgagacatctcacacactcaatattctcacccctatgggcatctaaatattgtgacagccttttagcaacacacaagtagatatatctttaaaaataagctgatttaagctaatgaaactacaataaaggaaataaaatatagttttcatagtaactgtgagtggcttttgatggggtgttctgaaaagaagtgtcagtggaaataaaaatgagactatgaaaaacaatagtgtgtgtgtgtgtgtgtgtgtgtgtgagagagagagagagagagagagagagagagagagagagagagagagagagagagagaatattgtgaagaccagaaggaaggacatttcagacaagcaaaaagcaaatgcagtgccccagaggcatgtgtgaacatataagaatcaattagcagaaggccagagctgctggtgggagagaaacagggacaagatcatgttcaacaagggatgattgcttgtcttatggggaccaaagtgagtttcaacttcatttaaaatgtgctaagaattaattggtgactggattagggaatagttcagtcctttaagtgcctactgcacagagaacatgaggtctttgatctgctccccatagaccgtgtttgtttaaaactggctacagcagtacaagtctgaaatcgtagctctggggagcaggagacaggtggattcctggaccaagctggccaggcaacctgtcctaatcagacaaatcccagtgacagtccccatttcaaaaggcaaacaaacaaaaccagtaaatggatggtgcccaaagggaaacagcccttgaagttatcctttggcctccgaatgtgtgtacacatacttacaaacacatcagcccatacatacatgcacagacaaaagaactaaaaacaattaccaaactgtgacatttgaagagataggtcacacatagtccatgttatgtttttaaaacaattatcctgtgtagagaagttagagagctgctgtagggagagattggaagggaacagaggattgtcaatccaactcacatgggccgaggtctaccagatttattatgtgagttctctgtatccgccatcagaaaaggaaccagtttttttgctgtttggggcatcatgtagagaatgcactgtgttctcttgactttgaccagcttagcagctgcaaggcccattatcacttcattcaggttggattgtgaacctagaagagagtgaaacagggaataagtaactgtccatctaggtcaaagaagtagtccaaagatgtatacaagatttagtcagaaaaccttgcctcatgtgaatggttcctgtgtgttcatctttaagttattcccttaacatgtctctggtgtccagcagaatactacaaatcatgtctctatgaacaggagcatacttaaataatagccaatcttgttctacttgttattcaccctggcattatcaatcttctcattgattctgttttaggaacttttagaatcagaatttttacacatgagaacatggagcaatggaaaagtcatttgctcaagaatcacaacttggagacagagctgggaagttctctgtggctttaactccagagggcacatctgtaaccacactggatataaaccttggtggcctggcaagtgcttcttgtcacagtaagctgccattgttgctccaggaacagaaggtcagaggccaagctctgtctcccatctagttgttccaaggactcgtgaatgtgtcttcaaaatacattcagctaacaaaaaaccacctagcactgcttcttctattaacaccatagcctgcaatatttgaaattgcttttgccatagaggtagtggaagccagaccatggaatgtgcactagattgggattctgaagtttacagaaagaaaaaatgttgcagggtggagagtgatcctccagatgttcatgcaggaggtcccagcagctgacgcatactcctgcccccttactttggatctgcagatgttgtttccagttgatagcctctggtgtgccaaggaattccaaacagttcttaggatccttagaatagagttggtaagtgttggtatggggatcaaggtcatctgccatctatttggttgggcaacatagaataaatgcaattgattattccatataatttcaatatttttcattacactctttttcctattattttaaaacttagtctttgaaaacttcataggtatatacaacacatttggtcatattcaccccactcccttcctcaaactcaagaccactcccaatatatctcctttccaatttcactttgtctttttttaaataaccattgagtccaattagtgatgtccagatgtatatggatttggggtcacccaccagaacatgggcaacctgccaatggtcactgtccacaaaaacaaaaagtggttctccttctctcagcagccactagctttagtcagcgctgggagttcaggaactcctttcccatccttgctggaattttcaaactcatttatcaaatctaagcagagatgttttcttccaacgtcagcagcacctcttaattattaacatcatgaaccccagtcaaaaactccactctatttatggaaaatttgtattaaactttattaaatttcatatataggtaccattacaatttaaattcaattaaagatggtttatgaagcattcttccctaagttagtagtactcaggaaaaagaagaaaagtgatactgtcaaaaaggccctataagaataactcttcttgttccaaacagcctcaaaacaaacgtgttttttctttctcccggtgtgtagagtgtttgtgcatggatgtggggtgtgtatggaggttagaatacatctttgaatgtcagttcttatctttcaccttatttgagacaggactcttatttgctacctgtcaaacttccagaaattcctttgtcttccaagtcccacctctataagaatgctgggattacacacatgcactgttttatagagctttatggaccttctagagatatgaatccaggtcctcaaatttgcacagcaaaatctcttcagcccatagatatatttttaacacaacattattaaaattgacaagatgaacttgtatttgaatattttacttaaaaattcatttattttacataccatccccagttcccactccttccccttctcctgctcccccatgcctccccctccctatgcccctatcagtagcactaataaataaaagactcagagactgttttcttgtgggggtggagggggcggtgacattcaggatttatgctggacatcagaaaagccagccactagttcttacctctacctcagactgaaaggcgatccaggtttcaccaaatctcaaactgcaatcccaaactgctatgctcttctcaatgtgactggagaatcctgagagttacttctgaagaccttgctcctatcttttttatctctttaatgttgaaactaaatgtgtgagctccattacttttttccactgattcaatctcctgtagcccttggtggccttgaactcagagagatccatttgcctttgtctcctgagtcctgggattaatggtgtgtgacaccactgcctgatctgcatagcttgcggctgactctgctttataaatcctcaggcaaactttaataaatcataaataagatatcatcacacacccccagtcctcatagggtataaggccttccttggtgagtcaaccaagtctggcatatcaacttgaggcagggccaaggccctcctccctgtatcaaggctgacaaaagtatcccaccatagggaatgggctccaaaaatctagttcatgccccctcagataggtcctggtgctactgcctgaatccccccccacccccccgcaacagatcaagccagataactgtcacccacattcagagggtctagtttggtcccatgcaggttccccagctgtcagtccatatacacgataaggccatacaaaaacaaaacatgtctttaaactgcaaagtacaaagcaccactcttcaaaaaaaatgtgtatttctggcaaaatcatagcataatttgttcaaaagctcctttcaaagttaataaatgacagctgggaaattcacagataaagggaaggactgaaggaaaagtattcagctaaggcaggctagccagaaaatactgcacagaaatgcccttgcagataggcaaaactacaactgacaatccatctaatcaggacaattgaaaagcagatattcttcacttttatgtttaaagtatattaaaatttagttgactgtatgttgtttgatgagtttttaatgaatgctattgtgtatgtttaaggcgcatgtgctatgatgaagcacatacataataacaatagtaatgtttaatatactgaagccaattggcagacctgttgtctcacgtaattacctttctttctttggaaacagtagcaagaacttaatttagcagtaaacacagtaaaattgcacattgaacattagatattttggcttgtttagtctacatatcattgatgtcttaggcatgtatgtaactcctggctcatcgccatcagttacataggttttagttttgctcagatatgtagaaaaactttttcagatacatagaattttttaattcacatgtaagtgagattataatttttgttctgtgactgtccatttacctcaccaccatgtctttcaagttaatctatattttagaagataataggatatctttcttttactgctaatatttcattttatacagatacctgtttcccattcatctgtctgtgggttccagggttatttcttaggttttataaattctgcaataaatatggctatataggtacttgcagcactgattttttaatatttctatacatgcctagaagagggattacaggatcaaataacagttctatttttgtatggaggtgctttcctcctacatgtagactgttaagttttgtcaaaaaaaagagtattagattttatcaaataattttttctcatccattgacatggccctgtggagctttgatgaaccacacctgctggattgcacatgacaagacagcctggcatgatagtgagtcacttcacttgaccatggagtatagtcttttgatatgtcattgaacttgcttcataatattttattcgttgtgcattaatatcagtagagaaaattactaatggttttcttatctttaatggcttagtgtgaaagtgatagtggtcttataaaatatatgtagaaaaaatcttctaagtctatagtttgtaataagcagtaataatctaggtatggtgatacatgtctgtaattccagaatctgggaagctgatagaggaggatcaagaatttgggacagcctgtgctacagaatgaattccaggccacaatggctaggtagcaagatgctatctgaaacacattaacaaagcaaaacagaaaaaggaatactagttctgatccttcttggaatgtttgtagtactcagtattaagccatttggtcctgggctttggcctgtttgatttttgtgaatgtttacatacaatatattttgattacattctttctccttccagattttctcctaactgcacattatttctctgcctcaaaagaaaaacagaagccaaacaaaagaatgaaaatcaaaacaaatgaacaagaaaaaaaaaacaagataacaagccaggcagtggtggtacatacctttaatcctagcatttgagaggcagaagcagacagatctctatgagtttgaggacagcctggtctacagaagctagtttcaggacagccagggctacagggctacacagagaaacccctgtctcaaaaaacagagagagagagagagagagagagagagagagagagagagagagagagagagagagagagagagagagagagagctctccatctctgttccggggttttcactggtttgaacttgtacaggtcttgtgtgtgctgccatagtctcagtgagttcatatgtgtgtcagtcctgttgtccagagaaaatgctgtttccttggagtcatccaccacctctggctcttacaatctttctgcctcctctttgatgaggacatttggaggttttcattgctccttcagtttctatttgctattggtctcttcagcctatttgtttctcattcaatctttgtaagatggatctttccaaacacttttatatatactcttgattacccagtcttgggcatataaatatgtatattagcttcttatggctcagttcatttatgaagtctactatagtatctttgctttcatttttattttattcacttgtatcttctcctttttccttaaactagttaagaatttgcaaatttattttcagaaaatgaactcttctttattctctcaatctatttcttttcttatatttgttatttctttcctacatctaactttgtatctagtatgttctagtgtcttgagatgtaatgttaactatttatttgggatcatcattccccacacagaattatctttgttctgaacttcttttttcagggcaccatatgatttcaatgtgcctatgcttgctcagacttgtttattagtgtgtggtttattctggagaagtgttttcacttgtagaagaaacatgttctgctattgctgggggaaactgtggtgtgtcaggtctgctgtgtctaaaatttaatccaaatatggtgttttcttagtgattttgtgccttgttgacctctctactccttgttgaaagtgggttatcgatgtcttttacagttgttgaattggtatctattattctcgttgtgtttgttaatatttgctttttatgtttctagtattcaattctaagtgagtatttgtttaaatgatcatcaaataatagacatcttgatccttgtgaaaattcttaactatatgtctaagaattcatacccatgggctatttttatatctgttcgtatccagtgtatttttaatccatgtacatttgagatgattataaaataagagtgtattgctgacagtttgttatttatttcttcttttgggttttgatctgatgctgttttcatctcttatctctctttgtggtttttcagtttagagtaaatgtgcttatcctgtttccatcaagaacagggaccctggcatcaccagagtttatctctgttactttggagcctacatatttccgggtgcacattagatacacagcaattgtaaacctagaattatattcattccatgatataacttacctcttgaggacggacaatcactgtattaaagtcaggccacttgtccaccagggccttgagcttgaatgggtttccctggttcatgtggaagacagtcccataaacctaagtatttcaacacattgaaaggtcagctcattacatgggaacagtaaaagccttgattttgtgaccagaatgaagttaatttctacgaaattagtgtgtgtaagtcatacaatatctagcccaatcttgatataatattttactactccaaagtaggtagatttttagacaaaatcgagaaactattataatatgtaaatatgcagatactttagattagtgatcactcagtctcacgtcatagaattttgtcctatacatttccattttctgccaataagcatatgcccatataattatataaataatgaaattccctaatgtatatgaatttcacatatactgtacaaagacttatctccatgtcaaaaacagaaatttacatgacagtgttttataactgcctaatagttaatatttgggatgaattaaagttggcatgtgtgataaactattcaatactcattgtttagagagagactttgtttctaactataatacactcatctttctgctacctgaaactttagtgaatatttattggcaatgactgcaaaaatactgacttcttgattcttctactcactttgtatgcaagcacaccagctccgggaattatttaactgctgaagtgtcgcccaatgaattttttgatcaaagaattttaaacctggaccatagactctatcttgacagatacctaccctgtctcatcagaaggagcagagacagaattacaggaaactcatgttttagtctatgaatgacagatgtacaggttgtcagagaatctgggaaagttaatagaatattatacaattcatatttctcacccttacaatcatagtaataaaaagtaaatacattttcttcctgttgtacagaagaatccaggtataccagtggttaacaaaagaaaatgtaaaccaacaggagtctctacctaatattttgggaacttggggtttggtggggggttttggttggttggttggttggttggttgttggttggtttttgtttgttagtttgtgctattgtaaatggtaacaattttaaattttttattccagttattaattgttaatttgtaaaaatggaattgagttgtgctacttgtatactgatcatgaatcctttaaccttgttaaatttatttccagaagattgttttgtggattctaggcaatcatgacctctgagaacatgctacattttacttcctctctgcaccacccaccatatatattaccttaatttatctttcttaacttatatattggttaggtcaccaaatatttcattaaataggattagggaaagtggatatcattgcttagttatccatcttaagcaaaatattccatttctttgctatatagaaagatcttaattgtacatcgtacctacactttttgtcaaattgagtaaattcttttttcctactttgctgaatttcatatttgtcaagactattacattttatcacacatctttctgtacctattattgaagatcaagctaagggtagtgatttacacctgtaatgtacgtacttgggatggaggcagggtgatgatgagctaaagggcaaattggaaacacccagtgttatataaaacaattcctgtgtaaactcaagagaatgttcctgagtcaacaaatatcacctggaacaaattatcacattgccactcactacggtgtgatctaatgaggctttcattccctcttcagttaaatgtgtatggtatgtgcccccttgcctcagggtgatatcaactaaatattaggccacaaagagaatacctgtcccaggacacagctcagtaaatgttccttctctttcccacctttttcttagacacttaatagtcccctttccacgagaatgttccatgttcacctttaaagactcaggaaggtgtttccttaaggatttctccaacatctgcaacatctgtggatttcgcaaatggagcatcttggcagccgccttgtcctaaagaaaggattaagaaaagtctaagatatctgctgggagatggtatcttctatatatttgatgccttgaataagaatggacagcataggctcatatatttgaatgcttagtcatcagagcgtggcactactgaaaaggattgggaagtgtggccctgttggaggaagtaggccactggagatgggctttggagtttcaaaagcctaagccaggcctaatgtcttgctcttcctcttcctgctgtctgtggatctggttgtagaactctcagctgcttctccagcaccatgactgtctgcatagtaccatgttccctactgtgatcgcaatggactaaatctctgaaactgtaggcaagacccaattaaatattttcctttataagagctgccatgttgtggtgtctcttcacagcaaaagagcactgaataagacaatctataacaggaaagctatacccaggacatctcaacaacatggttacaaaaataagacctgaaaaactgacagtgtcagctgacatgccagtgtagataggggaattctcacaaggcttctcccccagatgatgctctaaagatgatcattgatgctgacagcggaggaattagtcttccccagtaatgagttatgtcagccctaaacagccataatcagcactaaataaactcagcaagttgtaattatacattttcatgtgtgcatgtatacatgtaataataatcgaagagtaaaagtgatgaatttagaaagagttgggatggagcagaggagttggaagaagaagagggagaggaaacgatgatgcaaatatagtactcatataagtaattttcaaaaaattcaaaaagaagggtcaaagactgagaaaagctaggagacaagcagacagaatgggcagttctagttcataacctgagttatattcctgctgtttcatgggtacctcctatactaaacttttcactaagtggaagaaggaataggtgccactgtgtgaaatgatcacgaacataatttctcaaactttgaaaatatttctgaagattttgctttcatttcataacatctacaattctaaaaataaagggtgtatgaagttaacaaatctatggtcgaagcatatatgggcaacttttgataggggtgtatgtgtttgtgtgtgttatagtaagcaagtattcaaccactgagatacatacactgataagtccactgacttttcttctatacaaacacttgtgaatttgaaacaaactgaaaagaattgggatggatgggttatctgtgtcgctggcacatggtaaatgaggtcatggtaaatgagatagtagcctttaagtctaccacaaagcacctaactctatggttgctcattatttgccaacctatcttaatacctaaatgaagggaattgtttattgatactggcaacaaaaaagaaaaacaaaaggtgtttcttctgagctcttccatgtagattataataatgctatagtacatacatcattaccaaaggtgacagtgtgttagaatgagaattttgcacataaataagcagattaataggtagatggataaatggatggatggatgagtaggtggttaatagaaagatattcgataaatattctttaaccttgatcatttattttctacatagaaggattagcaataatttatgtataataaaactcaccaattttaaataattttatgagtgttggtaaatgtctatatttgtttaactagtactatgataataatgcagaccatttccacacactcaaaatgtttgattccaccaatctctttatctgactctctgacccaagaaatcatcagtagttttctgactctataatcgtccttcaacaaaaatgccaatcaaatggaattatttaatatatacttatatattaagtctatactgaaattgtgttgtatttttaatatatgatatattaaatattttgacactggatttttaaataattaaacccaaatttttttatacttcaacagaaaatttatttcttatgttttttaatcagtggatagaattcatgtatgcatgaatcagagcatttctttatcctttaatcttcttatggacacttggtctgttacagtttataggcagttgttcataaaattcttatgctagtaaaagtacacattcatgagaatgttttttatttccagaactacatggtatgcccttgactttgtaagtaattgcttatcttttttccaaagtgaatgcataatctttcatagtcattgtatcatatgaaagtctcattggctcttctctaaaataatcaacacttgtctatgcagccataatcaggaaccattaatgcagtgtctggagcctcaaatcctcatggaaaaaaaaaacacagggctcattactaaggcagatcaaaaggctaaggccaacatatatttcaacagatcaactttccacaggattggcaatgctggattttacccaaacactgtgaatcagcaaaaagagtggttgaagaaattctcctaatacagattagtatggatggatggatgcatggggaggggcagaaggaagatcggggaggtggtaagaaaagaagaagggggaggctacagtctagatgtaaaattaattaattaatttatttatttattaatttcttaaaagaaaatgaaaaaagaaatccttccaacctaatttgtatttggtaaacaacccacgagaaggaccatcctccccagctcacatgggtcttgaatgagcccttcttgttcacccaggacagtgataaatgcagaccttcaaaatccccatattttgcttcattaatgatgagctgaactcattaatcacctagaaagtaattgttaactacacagatcaaatttgtcaacttacccctgctcagcatacagtaccccttcccccaacagcttccaccaaaataaactgaactcaggtgaaatgttccctgacccctaacagacactgttgcttggtccatgtctctgcacaaagttctctatggctttgcttatttctttgccataaacaactaaactgttgacccacatcaatctataagaacaaagtctgtgttagccaacctgacccaacttcagttaatattgccctgatcacatgactgaactttcacccacgctcagcctgagccaacactcccgcagagaagcctcctccatgccgtgaggactcttcataggctggctttcactactgtcagagagaacacttctttcccgcctctcagatgtttggatatttgcagatcatagggtctgcgacatctctatcacaatcgtcccaacctcctgcaaattgttttgtaataatcctttgtataacaattctcctctccttacctaagccttgaattatttcttcatcttcttcttaaaaaaaaaaaaaaaagctacagccccattataagtttacctgggactagcataagaacccaggtgtctgccatgttcatcctttcatataataaatcatggatgaaaacttagtgattgcttttgtaaggagtcaacttttggaggatgaataaaactattttgaaaaccccttccttccatgaagttttataattagagtagatcacagacgagagagagagagagagagagagagagagagagagagagagagagagagtacctgtggagaccagagattgataatgagtatcttctgcaacttttctcaatcttactttctttctttccatatgtgtgagtacacatgtgagcactgtgtgtggatgctcacatttgtgtttgtgtatatgtataagtacaagcacaagtgtctgtggagatcacaggacaaccttgtttgaggcagggtttcttgctccttcctgttgcatctgccaggctagccttgtgagcttctggggtctcttgtctcctcccctcatttctccatttggcatgctgggattacaattcctgctttgtgaatcctggggacctgaactctggtcctcttgcttgaattgttagtactttatccactgatccatttctccagctcctggaccttgactttttttttttttttttgaggcaagctctataatgaagtttatcaattcagctatgagccccagggatcctcctactttttccttccctgcaataggatggcaggctccactgttgtgtctggcttcttacatgaagacctcatgcttctgcagcaagttcttaaccaattgaacttattcttgagttctctgtgtagaaaagtcttttgttttttaactcctctctcatacagtacactccaaccacagaaagtctcgaccagaaccactgaagcagagtcatatctaaaggtaggctcgggagaattcacttagtcttgtactctttttcagtgctggtaacagagcccagggctttgtatgtgagtttcatagcataaatatatctgcacggcttcaaagtaatttttaatcactaagtttgggtctattaatcatatctatgatctctttcccacacagaatactccatggaaatctctttaacacaacaccatgctgtagcacccctgacttttcttcattttattaatttaacactatcttcaatgccttgttttgaatttctaggtaaggtggttcagtataagctggtaaaagagaaaatcagagtaagaaaagataccaaagatagaaagacctttggaaattcagagaatgtgaaaggaaacctgaacagtcagagatggaaatggatgatcattgattagaagcaagaacactgctacagatgaacagatccctgatagcaggaaagaataaggctgtggtaatacatttaaatttaataaagcttgcctgaaggatcagatcgcaaacctagccacatccatagaagctggacagtggtggcacaaacccttaattccaggactcaggagacagagacagatggatctctgtgagttcaaggccacccagtgctacatgagagagaatcagtctaaaagagaaacagagctcatgcctttaatcccagcactagacaggtatctaaaagacaggagcccagcatctcatcctggatctgagatttagtttccaatcacattgagaacaggatctccccaagccttgatagaggtaagagctactggctagctgctttgcatctgatctttcaccttgaaccccaatatctgtctctgggtttttattatttgtgctatagaagccacttccaaaagaaccaggtgggagacaggcagttccatcttgcggacaaactagtagtcctcactgaattcaaatccagttacgagtttgtaggaggcagtgacttctctgtcaaatgagacttggagaacagtgtctgaatgccatcttgaaagaggagatactgtcaaaagttgattactatgggggctgtggtaagggatgaggatattcaaaccttgtgacaatggagtatagttgcccttcactgctgggaactcttctggttatatcctcaaattgtttattcttatcctaaatgtccaccacattgtcagataaaaattgacatctcttcagaatagcacagttcctaagagaaaattctgaataactggagttgaggtccaggtttaacaaactggcagctggatgactgcacaattatatgacttctctgtaccccatgttcctcgtggataagagataatcatagtacctgatttaatgagttaatgtctgtggtgcgtgagaacagtacctggaacactgtagtgctctataaatgttgccattactaacatgagctgacagtgtagtatgtaatcagattgtgaattttttataatgtgtcaacatttcagggttagtaactggatagacctatgataaccatatactatacaggatattatttctctgactattagcttttgacttcagaaatactacttagaaatcatgaatataagaagttgaataaatcacaaaaacacaaatttttatttagttgacagctgtcgaagtctattaaatgagagaactatgaagtatttatattaatccaaacattggtttgctcatttcacttggtgtaaggattcattcttcattcaacatgaatatttatgacctccctcaatctataagttgaaattctaacagccactgcttatatactgagtgatgagactttggtactaggtctcatggacatttcttttacagacacacaaagaagacaccgtccctgaatcaggaaacaggttgcctctttgatcgtgcaccttccagcatccagaacagtcaaaagtgcagctgttgctgttgatgagtgtactctcttatggaatttggtttgagcagctcaaagagtctaagacaaagtagccaaatattgaggagtgtggagatttttaccaaacagcatctttttccaagtcccagagagatgcatgaaaatagaacagtaacattccaagaggccaatttgacatttcagctagaagcacctcagaaatttcatgcaaataagaagcgaagtgggctgggcggtggtggcgcacgcctttagccccagcactcgggaggcagagtcggatctctgtgagttcgagaccagcctggtctacaagagctagttccaggagaagaagaagaagaagaagaagaagaagaagaagaggaggaggaggaggaggaggagaggaggaagaaggaagaagaagaagaagaagaagaaggtggagtttggtgccagagtacagcagggataatagtgagtattgcctagcacatttggaaccagcttcagcatgtgtgcgcctgcaccctgaaacagaaacacattatcaactagttcagggaaaagggggacaggcacacattggtgacctgacagttctggtcatgggtaaagtcctcttgtaaatggtatttggaaactgcttacgaaaccgcttcaatgtttgggatttatccaaaaaaaaaaaaaatgaagaagaattttctatgaaaaactgtacaaaatacagacatgtcaccctttatgtacattcatatatatgacacaaaatatttttaaattagaaatccttgtgaatatagttgcattatagatgagggtttgtaaacacatgtgtttatggttttgaataagaaattcacattttctaagtgtttgcatatttttcatggtgatttttaacagggagactcactcgtattagtagtccaaagaatctgactaccttagtgtgttacaaaataatatttccatgtagacacatacatatatgtatatatcttgtctcaaataaataccacctgaattagcacacttcctcccagtctcaactatattttctgtcacagatctacaaatagcaagctttcagtctctttgcatttaccaattcataagccattcaatcaagaatttcttacagatcctagcaaattgctgtgtcagctgcctaagttttactaaatgaaaaacttcctttctccccagacatacttttcatcacctatgagtactaacaatttctatccacacccaaaggaatatctgatgcatccccttcaagtagagagccaaagggagctggggagtccccaggtgtcagcttctccttgtcctcacctgcaaagctgtctcctctttcagcctccacagaagtcccccggaaacgcagcaggagcagtaggttgtggcgatgagaatttaccatcagagtacatggactatggggtgctttgatccagtttctaggaagctgttgagctgaagttcttagaacatgtgtaccaagctatgcaaactcaaaacagcatgagatcaggcccctccctctgtggtccttgttccagaatccactctgtaactgggaagttagcaatgtacatttggggctcttttccaaaagactgagcaactttctgctcccagaaacctcactgtcacttggaaactgaagtcagcctaccaggagctagaggatgtgtgggtatacacatgcagcagtatattatttggtcataaaggcataaaagttggatatgtgctataatgtggatgaattttgactacatttactaattgaaataagctagatacaggtgagaaatatcatttgatcccacttaggagatctgtgtacagtaggcaaattcacagacacagaaggtagaaaatagaggttgccaagagctgaggaggtggaaagttattgtttaggaggcacagagttcactttggggaataatgatataggctggggcatagatattggggacagttgcaagatactgtgggtatatttaacactactacagtgcacacttacaataattaagacaatgttatacagactgtaccacaatatatgtttagatatatgtgaatgcatatgtatgtacccatatacacatgtatgtgtgtgtgcacatgtacacatactgtatgtatatagagagaaaacaaagaataatctattccttttctcagagatcaggttatattcctgtctgtgaatctctatcattgtattttttattagcttcatacaaatacattttgttttttctcagagtagctgaaggtgatcattgttacttaatataaataggtgtgtgtgtgtgtgtgtgtgtgtgtgtgtgtgtgtgtgtgtgtgttcctttgcatataaggaagtgcctatgcccatgtgtatacatatggaaaccagaggtcagtgttgaatgtcttctgcaatggctccctacctttttttttttaaaaaaaaaaaaaaatctggaactttccaatttgatgagactggctgggcagctagctccagagctcctcctgtctccctcttcccagcactgggatagcaaacatgcatagcttgtgtctggaatttagctgggtgctggagactagaacttaagtcctcataattacacagcaagcactctaccagcaaccatctctcaagtataaagtcttagctaagcaactttagccaatgttttgccggtcagtgctttgaaaactgctcatctttgtagtgccaggcaggatccagaaaccaaaggttacacagcaatttccatgcttcacttgccttgtggtctttagcagagcaaagtttggatggtattccaattgtacttttacacattattatgaacactataaaaattccactgaagcacaaaaaaaaaaaaaacaaaacttgaacttgatgcctctgggttcaaaatttgatgctgttaccccttaagtgaagccattgaataatgatgtctagcaagaagtctgggtattgaggtatctgagaaccttgtaactatgtctcaaggggggggggcaggacaggactgggaaggaaagatgaggaagtagggaaagaaaaaatattgtaaacttaactttaatgctagcataatagtcagaattatgacacggaaattccatgatttattcaaccatttttctgatttggaaatttaggatgcttccaaagtcttactactatctttttttaaaaaaggacaacatgagaggcatcttgtatatacttgtcaatttttggagctttattttttaattaataattggtacacagagttaggttttattatgccatttccagataaactgtgattctcctcacctgcctctcatcctcattaccccccccccgccccttattcccgtgcccctctcactgtacccttacacaaaccctgaacatgaacttcatgaagttcacattcgtgtccactgtgcttttccctgcttcctggacacactcccctcaacttacatacatgcagacacacttcataagctaggatccccaagatgagaatgcatgctttctgcctaaacctggatttcggttttttgtggggtttttttgggggggggttgttgttttgctaattcccatattcattcattttcctgtaaattacatgatttcatttttctttatagctgaataaaattccatcgtatatatgtaccacattgtcattatgcattcatctgttggtaccatctaggttggttctgttcctttactactgtaaataaagcatcaatgaatgtggacgtgcaggtacctctgtggtaggatatgcaatactttgggtacacactaaagagtagcttagctgcattcccctggtaactaagaatgctatttttaaaaaatctttgttgtccatttgtgtttcttctttttgagaatctctgttcctttcattagccaatttattggcgggccatgttggggtttattctagatgccaatgcccagccctgacattcttccgaagtctgtctgttcactctgttgtctgtgccctgctctgggaacaaagggagcccttccctgccaggcaggcattccagagcccagtcctcccccctcctctctccatctgctctggcctgttgcttcagtgattggagtctacaagcagaggcatctgtggatgccaccacagccaggatgatgtggaagccctggctccattctctctctacccagtaacgttacagcactttcacacactagactgcaattagagccaggggatccctctgcctccccaagtctcacacccaggaggagacattgggaaagctggatccattgaagagagccagagacagaaagattaaaagggggacatgtggtagccccaagtgtgcttgggacaaagcaggatcagccgaggtgtgagcagacaaggggcaccagcaatgtcttgcttgctaagcatcacttgggggctgcaaaaccctagagttcctgcacaaagagtcactagggaccgaaaggaggtattaaggggtctcctgctgctagactgtagctggatttgcataatcaagacactttcaaatactaggaaggacatttatttggaggtgatcatgggaccctgaggggacctaaggaaggaggcacctgccctcaacaccgatcgctgaccccagtaagacaaactgcccacaacccacgagcacgagggcggtagcacccgggagacacaagggatgtgggctgctcacccgtgtcttgacggaactggttcatggactgcaggtcgatgatgtagggtgcgagccggctgtccacctgacccagtaccacgctgcccccggcgcggggacccgcgcgcaccaccgcctcgatgtggtggctcacggccgggctgtagggacgccagcggccgtgctcgttcagccattcccacaccaccacggccgaggccaggagcatggcgagcccggggctgtggcgcagcactgcccgcctcccgggccgggcctcctgcgcttcctccggcgccgccgcctccgggcctggaccgcgccccctgccccgcgccccgccgccaccgccgccaccgccgccgccgccgccgccgccgcgcgggcagcctcagctgctgcccatgggggagtccgcagccgcgcaggcaccgggacgcggaccccggggccgcccgcctccgatcgcgcgccgccgggctccgccgctgctgccgctgctgctccgaagggtccagccgcttcatgcaaaggcccggccccgcgcactcgccgtcccgccttgcaaagccacccgggggcgcgcggcccgcccgagcgacgctgcagccgcctcgcaccagttgcgcctcgggctccgcgggcgtccgcgtggatcgcaccgcacggtcacgccctccgccctctctctccgtactgagcgcggcgaccgcggcgacacagctccccctgcctgcggctctgctcagtggcttccagaaggagtcgcccctccccggcagcgtcacacttttgcagcgtctgtctgttgtgagccggtctagtcagcggcgcctgcttcgaagctcttgtctcgctcacgcactggaacacccacactcgcgcacacgcacgcacagcctttagcactcctcattccgcccgctattgcctcatcctcgcatgcaatccttccttagctgtccatcaaggatgcagaagccacgccccctcgtcccttgcaccagcgccctagagcttctacgcctcctgctggtcagagtcctcacgtgcaagtcaaaagccacacacttggaaccattgagagccaatgccaaaggatgcatgcttttatggtatacattttattctatgtagaatctaaagagtctgagttgtactagctgcttgaaaaaaatatgaaacaaagaaatagaccccattttctgtatccacccggattttgtataatatgtgtacgtttataaaggtggtttaaagggagctacccccccccgaacactattatctatcaaacaaaaagcttagtacccagtatggagttacttcattaggaactgtcccacagaatctccaaaatattacatgtaatctcatatctctacgttactctccagaacttgataggggtgtcgataaagatgtcccatttaggactgagaactccatttattctcaacacgttgaccaagcatgtgtctctacattgattaatacccacttaaacaaacaaaagcttctacctaggtctaggggcataaacatgaatacttagaaggaattttgaccacaagattgtttaggaaatagccatggcagcttctaccctgggacctccccagctactgattgggtcagttttccagtgtggttgtgccatttttccctttcacttagcaatgtactcaacatctagtctctaccttctcgtgagtaaaacttgacattttatatattgtcatattattatcactatgaggaggcacacaccatggggtgtgtggagatgggagaacaacttcgtaaagtcggttctctttttccatcatgcagactctggcttgagtggcaagctccattgccactgacatcttgtgaacactgttgccagtatactttattttagtgttcctaatagtggtgtgatgataatttcttgtgcttttcatgcgcacatatgcacatatcatgtgttgaagatagtgatgtttaacattttcctaggtgatgagttccatcttcatatcttctttgcaaaatgtttgctcatatgtttggctacttttaaaactgaagtctgagaactttaaaaatattcccaataaaaatctttggataaatggcttgaaaatatcttctgtcaagctgtaacttcacaacatccttcataagtttggtttgttgggggggttgtttttgtttttgtttttttgcaactttctgccttccattttccataagaattgtttggctgtctcttagacttgatgcctttccctttttctctcacaaggtttatgattttacaatttttatgtagatcaatgatacattttaaattaattaaatgaaaaagatccccctccctcccttcttcttctgtcgtggctttgaggacttatgctccagtgtgatttactgaaaagtttcctccgaatttctttagtcaaatttctttatcaagtcaactggacatattcctgtgaaccttttaccggttactctatcccattccattgatttatgtgttcgcccacctatccatagtatatactcatgattcacaaactgtattgataagccatattggggtattgtaaatatgactaatttagaataaacaacattgttttaaaatcaaattcccattattcattgctggtaagtaagaaataaatgttttgttacctgttaactctataattactctaatttccactgtgtgctgaatgtctgtatctctccagaactaatatgttggtacctaagactcaatgtaataggctgagctgtcatgagtgactttagtgctccccaaatggtctggcccttttgttcaaaggaatcatcttggaagcattgaggattcaccagagacaaaaatcagtccttagaccttggatttcttagccttcacagctgtaagtaacaaggtttctactatttgaacataatgcataccaggacaggagagatgtctgctctttagaggacccaggttcaattctcagaatccacaaggctgctgctcacaaatgcaactccaatcccatacacattaaaaccaaagaccagtttaaaagtacaccagcctaaagtactttgttataccagcaagaatgaactaaatcattaatcgttagtccaagggatatttttgtgactgttatttactatttaggactttttcaaaaagctacataaacaaccatgaattctgcaaaagatcctttttaatccatgtgttatttgtttctttctcttgtattacaccagctaggacttctagtatgacattaaattggagtggtggaagtaaacattactgccttgttttgatctcaacaggaaggcatttaggttccctaccattaattatcacaatagatgtagagttttttaagctctttatcaacctaaaaaattaacttctatttctactttgccgagagtgcttgtgaactagtgtttagtcttgccaaatgcttttctatatccagtgacatgatcatgggttcttatttcagttgcatctcttaactgctacccactccatttccctcaccctttatctagcacgtctcccaaggctggcattggccatggagtcatgaccaaagtctccctttcttggctgtctgagaccctgtgtgtcatgcttttctgaggcagaagtgaatgcaactgtcaatgagctaccaaatatggtcaaaagagtaaggggaaaaactcaaatatatcacttgaatgatactcacattccttctccctcactgacccaaaatctaccaggtgtcatgcgtccttcttcctgctgggtaatggaagatttgatagtttccctctaccacttatggataaggatcctggtatgcctctggcattcatatctcctgattatccatgggtttgatctcttcccatctgaaatgaatgtgtgccaaggcctctactgtgttctgttagtgaaagtgggatgataaagaaaaaaattgccttcagcaaggcagctagctcccatgattttttttttttgtaaaatcaataacattaagaccatgcagactatgctcttaaactatttaaatttaaatgtcagggccttttacatacttccttagttactgcatatttgttgagtcatcccacaaagagaatgccaagtgaagaaagcctccctgtgtccagctgtcagttttgcctgtggcttcctgtttggaaggaatgtagttcctggctgcgtctgacagggggagatgttgtgctaggaaatggcctctaggcaggcttacagactttagtctcaccacaggggggcttacccatgctactttacagattcagattgtattagcccacacatagggcaagaggacaatctacaagtggagcagaggtcaaacaagaggttcccctctgcactgagtactgaagcacccatcacaccacccatttggatctacccaaatgatcctgtgttttagattccctttcttttccttccccatcaaaagtctcacctaagctccatcttattgcttccctcccactatcagaatcacgatgaaaatcagaggtgagtatcccgtacattcctgctcaacaacccagggaaaccagagatgctagtcaggggtagctagaggtgggaggaacaacaaaggagagacagaaagaggaaacttgattgtccgtttctctccaggtaactatcaatgctacagaagaccctgctgcccagatgtcatccacatctcatgctacccccattgcttctgtcagatgagctgcctttgaccacatcaatactttctcctctttggaaagggaaggatattgtggcttccttggatgaatcaaaacaatgatgttgagcctctctctgaattcctgccaacacaggcatacaatcatgtggcctccagagccccctttgagatagaaagctctcagaactatgtctcacttctcctccccccacccacccaaaagcagccgaagatgaggtggaggaaaaatgggttccgagttataaaaagagattaccaacatgttttcatcttcagttttggataactggcttggttttaacggaatagattcctggtgtttgggttcacctaaacctatgtagaacataagtttgtttttttgtctgtttgcttgcttgcttgcttgctttttactgctgacacgatttatttatgcactagtaattcatgtactcaatagccataactgtgtccctttactgtggagcaatggggcttgttctcccagtcacagtccatccctccctgttcctcagcagagaaaaacttgagtaacagtgaagaagtgttacaataactctatccgccaagctgccccaggcctgatatcacaggggcgctttctgccagaccgtccaagttccacccgctgtgttagggcccctagtaacacacagagacttatattaggtacaaatgcttcttggtcaatgactaggatttcttacttgctaacttagtcttaattatcataaatctatgtattttataagacttatcttatcgaggacgcctttttgctggtgccctctcttgtgggcggatcacatggcaactccagagcagagagcaggaagaagagaaaagggaaaggacttccttcttgcccttgcttaaatgagtttgcctgctatgtcactacctgcctggatcacaagactttcttttactacatttcccagaatcctccttgactcctagtcccacctaacttgctgcctcattggccaaacagtgctttattcaacagccaatagagaagataaacatacacagaaggacctcccccatcaaagaagcatgtgggtcactagcttcaccctccctccagtagtcagatgtagtaacagagacttttgatccccttccttccccatctgcatttctttcttggttagcagactttgcatccagatcccagggaatcctctcaggttctggaatgtacagtgctgagtgtgtaatggaaagaacagtggtttataaattacaagttgatgggctgggaagttggttccagagttgaatatttcttccagaggacctgggttttaattcccagcaacctcctgccccccccaccccacccccatggcagctcacagtccttcaattataacttaaatttcagaggatctgatgaactcttctggcttcctcaggcaccaggtgtgtacctagtgtgcaggtatacatgaagataaaacacccatacacataaaataaataaatctaaaagaaatgtcatagatggaaagctgagaagttagagtgtggccttgtttcatctcagatgggaatgagtgtagcaggcaattcactcaatcctatgtgcaaataaggacttgatctgagatgtttcccaattaattttagggagcaaatatggaatccttatttggattactctaagcatggcttagagtaagcattgaagaaaccaagattgtcaatcactccaggcctattttcttcaacaaaatcattgatgcctggtcacctggaatgctggagtgaaagtggtcagacaacctggtaatcctttactatgccattagaagcccccagctgagacttgtttaggacctaatcgtgggctttgtctctcagtgaatagaacgcatcctcctgaaagaggcaccacgtactttgcatcctccatcagtagaatctatcctagagcttataaaatattcttcctttccaggtcttagccctgagcactgtttcccagtcaatggaacccattcttaggataaaggtctcagatactacaaaatatagccgggcgttggtggcgcacgcctttaatcctagctctcgggaggcagaggcaggtggatctctgtgagttcgaggccagcctggtctccagagtgcctggataggctccaaagctacacagagaaaccctgtctcaaaaataataaaaaaaacataaacagggtgctttataagggaatttttatataaccatctctgaagctttgttatgagaactgtcacatggaagtttatccccaaaactctgctgtgtttaaatgtgtaaggaaataaaatcattgggtcagattctctggaagtttcaatcccatatgactgatgaattccagctgcacccagttttcattctaacatcttggagattgattttccctgtcagtggtgatacctgcagtgaccctacccccaagagaacctgaaaataatgaggtacttgtggctggtaagagttaagaagtgcatagctaaagacagacagctatggaaaccacctttattagtttataacattgagaatgtgtatttggaacaaaccaatgggaataccatacaaataacctttactcctgttgcatctaaaatttcataactcactgtagataccacactttttaaattttggttccccctttgttgccttttggaaagatacacagagcaggggaaacacaacatcacacaatagcactaggggatatgttgaaaataaggggacttgtgaaaagactgatgcaatactggaatccagtctcttagcaatcttcccaaaccatctcacccactcctcccccttccctcagatgatctaagacctctggctgacttcagtgcataagttctccttgattttaacagttgtgagattgtttcctgaccatgacttcttttctctttaagggaataaggcttgagtgtcaactgctgagaaacgttctagtctatgtagtgtcctcctggcccaatccatggtaaataccatgaagtagaaacagtctcttcgagtgtttgctctccataactcatttccaggattacccaggtgcccatattgtatggcacattgtaccttccctgctcaatgacttccacaccattccttgcaggttcattccagattcaagtcttaagccagaaagccagtgtgaaagaagggcaagtgatttcagggaactctgggtgctgaaaaacctgtgccccagtgacctggctgagttctggtcagcagagaaggaagatacaggtagaagccaatgaaacagtgcctttaacatctgttcaagttgccaggagaaccataggtttcttttccctcactctctttggcccacaactccagtttctatgatctgaactttttcacatctttgcatctcctgacactaagtcccttgagacctggtttgtacttaatcttctttatgttattttacttaaatagtttaactccgatgtttttgtattgttgttcatgacctttgaagaaagatactagtacacaggaagtaatctgaacactcattttttggtgaaatcaatcattttgaaagttcataaaacattattgtctgcagaataacaacaccgtaggcaattcccttaaagttggaaaatagattacattctcttaggactataggcttcgcatttcctcatcctgacaatttccaaagattttattataccaatctctattttgcttaatatcagcaataatggattccatagtagaaccaaactcaataatattggaaactccactttgatactcacaagtgtagccagcagagtgcatggccaccaatgaaccataagaatcaaacactggggatccagatgaccctccaaaaaaagtagtgttgtaggtaaccacatgagggttttgaagcatttcctggaagcttctttgggtgtacatgtggatatatggcatagaaaactggtagcctgctgcctctcttgcctgaacattctcctcacaatttcttcctcggttatcttgagggaccactgtacaaccatcaatagacttcttttctccatctggatggccaatgatataaatcaacccagtaagtggtgcagggcctattccattatacagtccagtaggtacttcctgtccattttcctccagttcaaggacagcatagtcaaagtctttactggatatctcaaaccaaggtttaacactaaaagcattgtcttttcttggtgggaactcttcaaaatcaaagatcacctgtacacattgactaattatgcttgcccacttacttgacgctgtgccttcccccacgatgtcatttatcacatgccgacaggtgaaaatgtacaatcctttaaaaacaaagcaggtggcacagccctcatttccattattgtcccaccgcaggtacccaactgagtcgctgacccttgaaagatgtttgtttactttaacagaagtagaattttttgtcagtttcccaaagttttcttggtgtattttgaataaggaaacactcttctttcttttttcactttcttcctagatgtatgctctgagttttgctcgttgttcttccaatgtggggtactcattcacaatgcgttcatctacctcataaaagtttctgttctcaaactcagaattctgagtgacagatactaccttcggattctttgtttgctcagcctcaacctgaaagagcttgccatctaactcatccactggctgggtgttttctatgatggtgtccagttcaccaatgagcctccaatggtcactctctgcaaaaagaaacctgccatccttcctcagagtgtccttgatggtctctcctttgaagccaaagacacagagtttgttcccctttttgtgaagttctccacacttcacaatctttttcctcttagtcccaattgcatgaatgtaaaatcggacataactggtagatgcttggtcctgtggttcaaacaattgtttatttgcttccggctcacttttacttagagagaacctaatgaacacgtggctgccttctggaaaacagcagaggggcatggcagggtttatgaacccttctattccttctttgccccagaccagcatttctttgccctgatgatgatctatctcttttttcacagcactgagagttttgagggcttcatataagctacttgtctcactatgtaagagctcatgtttcatgtttttgttcttcctgtggttcacatccaaggtgattaaaattttcttatttgagggaggagtctgatcttgtcgaactttcttggatgaaagtggtctttggtcctggatgttggttatatctcttggcatttttctagagtccacttttacttgagaaatactggaattttcctgatcttcattggacacctaaaaataaatggtggattctttgtaactgacaactctggtcatatttccttttttagtaccaactcacacaattcctgtgggaaattcagtaccaacctcaaaagatcaataagtagaattaaactagagtacatcttgggatccaaaatactacctcaacttcctatcacatcagtcagaaaagctcctcttgttacacatggtgcatctttttaacaaatagtagaacagacacaagtgtaattcagatactcaaaggtctacaagcttccctgtatggtacttcaagtcattcttattattttcagcaatatacattttatcttatccaaacataaagtgtattgaaataacagtttattaagctatttatttatcattaatttgtttttttaaatgtatttattttacatatatgaatattttgcctacatgtatgcatgtgctccatgtacaagcctggcactcatagaggtcagaagaaggcatcagattcccttgaactggagttaccagtatttatgaaccatcatgtgggtgctgggaatcaaatccagttcctctgcaacagcaacagatgctcaataattagtgctttattgagatagagtcttgctataaagttaagacttccctggaattcagtatgtagcccaggtttgcttcaaactcataattttcatattttcttaataccgtgattcaggcagcatctatcaagaaatgaatggaaactattccctttgtctttttattggatcatatatttcttgtaaattttcatcatctcccattcttatgggactttagttaagaaccaggagaggggaaaatgagaggacataaatcaaattcagtaaataggaaagtctcaataaaaactaaaaaatgtttgtggcagttattgttaactgtgtgcttgacagaacctcaaatcaccaatgagatgggtctctgaacacatctgtgtggtgttatcttgattacatcaatcccagtgagaaccagtctaaacctggcaacatttccctgggttaaatcccagactgtttgagacgctgggggaagggagcatgcattcactgatctctaccattggctgtgaatgcaacataactaactctcccatggtcctactgctgggacttccctgacatggtgaactgtaagaaactgtgagccatataaatctttcctattttaagttgattttgtcagggtattttgtcacatcagtagaaaaagaaattaagacagtggctgataactatgtctgaaagggtcatttcctaagtcatattcagtatgagaaagatgccactaggcaatgggttcatatgccatcaaagtcactcactggtaataggagtagcaatgttggagcttggttaaattaaccaagctcatcaattgtagtgacactaacattctcagttaaacagacgaaaagaatgtaaggcaatataaatctactctatccaggcaatctatatatctgcatatctcaaaatatatctcaaaataaatgcctgcagtctagattttgtcaaaacttctttttcataaccatgggagtactgaaatagaccttcatatatttaaatattactggatagatatggactttttgtcaaattttttcttttcctttttgaggcatcatatagttcactctggtatcaaattcacaatcttatattctctacctttggaatgctgggattacagcattgtgcctggcctggcgagtttgaaagggaaagggattgtctgtgttccttgagcttgatgttatggaggaagacagaaataaacagatctctgcttgtcacaggttttctagctatttagatacctggctttctagaactggcacacaaagaaacaagaaaaaggctttgactttgtacatcaaatgcctgatgcttctcaactatcttgatataataaaggaacagtttagtctcagatgacacaactgtttgtcacgttagaggcagagaggagaaggctccaaatatctcagcaaacttgcccaagttgtcatcacatgctcaagagactctattctctcttttgtctccataaaccaattgggaccaaccttcctcaattgcctatgaagtttgtggtaagaataaatatacaaaatcctttgtaaaaagtaccaagcaaatatagactgttatgattgaatttagtgctattaaatattattaattttgtttcacaggttgctatgatatataacatttgatcacttaaagagatccattttgtttgttccacatgttgacatgacatactacatttaatctattttattaatgtttcagatatgattgcaatactttttattaaacactgctttgatatagctaaaagctgattacaattcctcatctacactgccattcaccaaaataaatgtagtaggtgagaaatgtcactagagtatgtcactgtcccaatcaacaatgaggcattttcttggcagtcaatcctatgtggcccatggtagttaagacagctactagtatatcccacaagcaatatttgtagacataccggagagaaatagtcattgatttttgtgtttttcctggcattgaatggaatcttctgtgatctgcgcttcttacagctcatggtgactttgagatgaaacacgtggctcagctgaaacacaaacttcaaaatggttcaagttgagttgggaatttagttcagtggcagaattcttgccctagcaagtacaaggccctggttcagtcctcagctaaaaaaaaaaaaaaagaaaaagaaaaaaaagaaaatgagaacaaaagaaaaagcttctatatagattttattgagggaaactatatgtttgacaagggagatgatatatccaccacgaaggcagcttctatatagattttattgagggaaactatatgtttgacaagggagatgatatatccaaacacacagcttaaagtaaacagaaaattcaaatgcagataccctgtcaaaggtttgcagctgggaaactcaaaactatgttcaaccaacattgttgttaaaatctggtctttgtttaaaagatatggaaatgataaagatagggaaattgtcaggaagagaactcattagcaacctgaaaacaaaaaaaacaaaaaacaaaaaaaggaagaaataatcaaaaagtaatccccatgggaggcctcaccctctctgaggagtggatgggggataggaagatggggggggggagtggtagggctggagggagaggggaactgggattggtatgtaaaataagatcatttttaatttaaattttaaaaatgaaatctgaaaagtttatccaaaatgacaggagcattagttactgttttagtgcttatgtttgaagtggcattttcccctgctgtttctgcaaaagagaaagagcagtttaaatgcaacactgaaccaccagctgtgctaaatatcactagaaggacaagcaccaccgagggcagcaagctcatgtgtcttcagtaagtcaccatcagaacaaccctagcatatggcagaccctaacacttcagttagaaagacacaaagagtacgtagacagacagtgaccagcaaggccatcttctcagtgctttccacaagctgcctctcacaattctccaaagcttgcttagataggtattattactcttactttacgcataaaaaggttgggttctcaggtgttggtggcacacgcctttaatcccagcactggggaggcagaggcaggaagatctctttgagtgcaaggccagcctggtctacagagcaagttccaggacagcctccaaagcaatagagagagacacctgtcttgaaaaaaaaaaaaaaaggttgacggttgggttctttctagagaggttaaacttccattcaaaaatcacaaaactccagtgagtatactttggaaaatttgtaatatcattttctaactgaaaatgacaagaaggaggcaggaacgaatcatataatgaacttccaaatacccatcatatagcaaataactattcttagaggtttcctctccaacttatatatcttttcctttctgagacaaagtctcatgaaactcgggctggccatggactttgaaccccttgattctcctgcctccacatttctgctgcctggattatgtgtcataacgtctggcacatgtgatagtgagaaccaaacccaaggcttcgtgcactgcatgaagggtaaacactctaccaattggaccacatctctaaccctacagtgtctttttagctagcagatgacagagacaaggtaagattttaacattaagtcgtttttctgtctctacaagttaagcactttcttatatacttacagtgccaatttagtcacatcaaaatacacacatcaccttttaagtttggggttaggctgttgttgcaagcattacagtccctgacagccaggagccaaggaataccacaaagtcacaacacacaacaaacctcacacaagagatttattgggactagggaggcagaggcaggtggatctctgagagttcaagaccagtctggtctacagcgtgagtgccaggataggctccaaagctatacagagaaaccctgtctcagagagagagagagagagagagagagagagagagagagagagagagagagagagagagagagagagatttattggaagggaacaaaaacaggagagtggctgcctctgctctgttgagaaacagcagcaaattgaacaggatacagggcttatgaagagcttcttgggaaggggatggaactttccagagtggagatttcacctccagagattgggctttttactctgtagagtgggacagggtccagcagttaagattattctgtgggtggaacctggcagttataggtcctcaggggagaggcctggccactcgtgtggctcaaggggcttacggtttgggggttgttttgttgtgttgttgactctgtttttctttaaaataaatcttgttttgtagcccagggtgacctcaaactgccatcctccagcctcaccctcctcagtgctaggagttaagtgagcaccatagcaccaacttaatcatgaattcacactctgtttccacctagaaaattatcagaagaagacacaaaggttgtctgcagacggccacccctgactcccttctcactactgtgtagctgaagcactaagtcaagcagatcttaaccatgatgtccatgaccctccactgtggagcctaagccctagatttctaccactaacaactgctaatgagccatgaaagaaatctactgacctgcctgggtctagtttcctgtttgtgaaaagcagcagcaactataaacgagacaagggcattctaagaaaacacgcacaggtctcatactgctactcagcagctgcatggcacggggcacactggctattttctgcctctgaggagtgaagatcctcaacttatgtgaagatcaaaaaatatgtaacacacacagtcttcagacaacggccatatgcggtagattgctcagtgaacatgactggtagagaacactccatggactgtagaaaatgaaagagactgaaaacttgaggaactggactagatgatctcttgagttagaaatttattgttcaaccagaaaaacaagttaaggttccgggtctgttgatgactcatactatgattcatattaaaaaaaaataaagtaaggaaaaaggaatatgaattttacagttcacacacttaagcaatatgaaccatttcatatctatcccacgcaaatgacttccagtgtccatgctgggtcatgttatattaacgtgtgaagtgcctgcagttgtgctggaccaacccacattataatttcaggagacagtacccactgtactaactagatttgttttctttcttcagtaaaacaataaatcaacacagcctgtgcagggccccacctccagcctcccagacagttcccgggaatctttctccatcttcttccctctttctctcttttccttccttttttttctctagcctttctcacctccctccctacttcccaatctctctctctctctctctctctctctctctctcaccttcacctctctctctctctctctctctctctctctctctctctctctctctctctctctctctctctctctctctctaggtctctttcttctgcactagccacatgcacattcttccccacttaacgattctctcagaaaggctttctggagacaagtaccacagctgatctaagcctctcccagcaaccaccatgcctttcactctagcattctggggccaaaaaaaaggggggttcgctgaaaacaaacctctgctgcctgggtcctcctgcctctggccccaagggctttcctgcctgagaagctcccagaggctcccttgtgtgcctgagtctggagccctcttgcagagtaccacagtttgttcataggcctgccaccttcctttgctcatagccagcgtctgctgcacttggctccagcactgaacattaagttggctcttactgagtttccctctccgtgccctgaaaggacacagggcctgaaaatgagcattcctggaagttttatctttgagaactctactctaatgaaaaataagggcgattgctaccgtctagtccttggaagaacattctgggttagtacagttatgttgatgaaaacagcagacaaacaagtcagtttaatgtagtagccagctatttgtgtatagaccgcttccacggtacatgctaggttgcatgcctgaataagaaatcagtacttgttacttagtctgcgtatttttattctaaaaagaaatagactttaagaaatggattagtagccgggcgttggtggcgcacgcctttaatcccagcacttgggaggcagaggcaggcggatctctgtgagttcgaggccaacctggtctccagagcgagtgccaggacaggctccaaagctacagagaaaccctgtctcgaaaaacaacaacggaggaggaggaggaggaggaggaggaggaggaggaggaggagggaggaggaggaggagaggaggagggaggaggaggaggaggaggaggaggaggaggaggaggaggaggaggaggagaaaaggaaagaaagaaagaaatggattggtgaatgtttgctacgcacatcttgacacgaagaagttaatctgaaatggggctttttactcaccggcttttcgcgctagggtaccttccctccagcggctggaatccgcgtctttttgaaaaaccgaaagcagaccatcatttgattcctttgttcaccgggtggagagattgcggattggtcctttcgctaaccatcaaccggctatgcgttagaccattggctgcgctcagagcgcggatccagacctgagcaagtgctcccgccctggtccttaatggccgcgctgtcaaagcagccaagcagtccttcgagtgggtgtggacctctcctctccaggaccccctcttaggacacactcgactgaggtgtgctgactgggcggggcgagaagccaaggagccaggaatcggtggagggttcccacccagcttcagggattccccgcctgcggggcaaggcaggagagccctggcagcaggtactgcagtgccatcagcggctgcaggcagcaagtggatgagcgaggaggagggaggttggagggcccaggacctttctagggggcaacatcccctacaggagaccagcttcagtgttgaacaatcaggaagaagctgcaaaaggttggcaaagacagaggggtctttttatcttaatttttagaagtgtattgcattatttgtgtgagttatgtgtattcatgcgcatgccacgtgtcacaactttaaggagttgatgcttccctaccatgcgggtttcatggatcgaattcaggtcgtcaggcctggcagcagatgttgagtcatcttaatggcctaataaatcgattttctaccactaaaaaaagatagtgcccattccagaaatatacatcctaaatatgatgttaagtatttgccatgcgttagtctgaattgagatgcgtagtgtggtgtggtatgtgtgtgtgtgagcgtgcgtgcgtgtgtgtgtgtgtgtgtgtctgtgtctgtgtctgtgtgagtgtgtgtgtgttcaaggtcagcctggtctacaaagcaagttccaggacagacaaggctactcagagaaactcttgttttgaaaaccaaaacaaacaaacaaaaaaagcaaaccaaaaataatttaaaggaaaagcaagaactagctcatcaaaacacacactgatcatatgttgaaatggtaacactggagattggggtgaatgaggtgctgtaattcagtcagcacttctcccaccacacactattcaaactgttcacagctttctgtcactacaaacaatgcttcagtaacatatgtatacaaaaatcttcacatcctggcaagttttcacatgattgatttacaacagaaacattactcaaataaggagctctctgtgtgtgtgtgtgtgtgtgtgagagagagagagagaaagagagagagaatgtgtgtgtgtgtgtgtgtgtgtgtgtgtgtgtgtgtgtgtgtcaattgaccctgggtgttttcctgggtcactttatttattgggacaagaactatcacaaaacctagaagctagatatctctgttagtctggctagccagcttgggccaggtatccccagtctctgccttcagtcaggtgactggtgactggcaggccatcatgcctttggggctttttcagggattctgcagatctgaactctgatcctcacacttagcactggccttctcaagagcattttttaaaacgttttggctttgaagaaagatggctttggagagaagacttgcattaaaaagctcttactactcttgcaaaggaccccagttcaatacccattacccacatggaagctcacaaccatctgtaactccagtttcaggggaccctatggtctattctgacctctgcccagacctccagcccctcatatagcctgttgtcttcccaggagtagaaggaatacatataggaaggttcaaatgctgggacttcaggtctggtggtagctgggagtttagagaccctatcccagttaagaaggctaattttggttgtcaactttgactatatctaggatgaactacagtttagaaatggagggcgcacttgtgatccagatctataggaaggagacaacgtgcctttgatctggatcttgaggctggaagacacaggcttttttatttatttttttcaatctggatcatgagtctggaaggcacacctttaatctggtccatacctactaccggaagcctatgtaaggtcaatggaagaaggaagggtttgttcattctcgcctccttgcccttgccttgccagcacatccactccttcaccagcactggagtctgattctttgggattccagaatatgcaaaagaccagctaagacacccaggactgagcaactaatagattcttgaattttccattcacagctagacgttgttggattagttgcactgcagcctgtaaatcatttcaataaattctttgtatacatatatattaagtcatattataagttctatggctgtagagaaccttgactaatacaccaatcctcttgcaaatgaaggcagtttcttcgcagcaaagaaagaggtgagctagttgttaattcaccaggggatagtaaaagatcattactctgtgcttgaccagaacagagtaggacgtccaggctcttgtctgtaacccatccccagaaggcccctctcaatgttttttgcacatttgctttagttcatgggatgacactttgagttcttatccatcatgctatccttcacctaccaagaccaactcataaatcactgtctctgtgatatcctgctcttatagaggcaaaagtgtttttctctgtttgcccagaacacacctgcaactttacttaccgaaaatggcttgctctgttggggtagggaagcctctttccaggcctcatgagggagccactactaaaaagcattggtcttaccccttaactatcccattatttcattatttccacctatcccagctatgtgagggactttgccaggttcttttgtttggtttgtggatttgacaacagaataatagctcaacattcttcacttggccaaaactattatgggcatgcctagagccaatgagatgcatcatgtcagagaaatgtagaagcatgttccttttcaaggccagcactatctccaggggaggttttcttggtaactatttattctctgttacttactcttcccatgttgctgagggtttgtttcaaaggcatgagagaacagttatgaaaaggcaaacaaagctgctccagcgctaaaagttgtgacccagctagtccaggctgtccatgagacttagctttacacttcaattggaaatgaagcctgtttctaaaactatgacatcagactaattttctgagcaatgttccttgatgattaacatgataacagaacggatgcatcagatgcttgctgctcaacaagtaaccaaacttcaagacagccagaaagcacatactcactgagtgccaatagaactgaacaaacaagaacaaccaggaggcagaactagaccacacccaagaaaccagaatgggtggcaataaggatgggaattagctccctgtcaacatgtgccttaattttcaccagcctgcaatgcaattctcagtaaatgaccaacatgcttaccgtcatgggtccaagcttctctcttttgctagccttttgtttattgttatctgttttctttcctcacatgtccagtccttgtcccaccttggccctccctgaacactcactgttcaccattatctactgaaagtgaatctttccacatcagcttttatcttttagatggagctgattaaagcatggacacatgtatgtatgcatgcatacatacatacatacatacatacatacatacatacatacatatatactacacacacacacacacacacaccagctccttcctcagactttatgcaacagccaatgaagactttatcactccagttgctcacatcaggaatcaacactgtgctgtcattttctccataaagaaattctgtaggctgtccctttcatttaaatgctaattccaactatggctactaccttgagaaccccaacatctttggagccccaagacagatatctaactatctgcccttttccacatctaccacaaccccagagtttgtagtctacatagccaccagtgatttttaacaatataactcagtttatattattactcagctccatagtctccctttagaatagatttcacacatttgtgataaaatccagactatgtctgtggcccactggatgatttgcacaggtatgtgctaacagtcctgtccatggttctttccagaaaatttcaaaaacattgtctctccctaccatatttacttttcatgatccttaaatttttacccatctacaatgaaagatcagcaaggtccctgctgagctgtgattatgtggccagttgcttcagattttaggaataacatttaaagaaactattacaattctccccttattttattttttaaacattctattattattattttgacaattctagtttctacagttactctctccaaaccctggagagtgcccagaacttaggctagattgtagcttcactgtgtgttttatgctaaatttggaaacacacacctagtgattccaacaccaccatcaactcttacataaacatgtgtttgtctatgagtgatcaaagtctgatcaccctgtcaccttgaccagccagctacacatattctcctcttctttggccaacatctcaaaagtcaggattctaggtaaggggcattcaccagtcaccccacacacccccatcaatgttccaaacctgtggtcacacagatggctaatgatcaaagaagagctggcataaggtacagattttactaacttactaacatacaccttagggttatgcattccacatacaaattcataatgttgctcacttgggagatttacacagcaaagatattgccagaatcatttcctaaatacaccaatgttgctcttttcaagtagctgttacctaggttcatcttgcccctctcttggaattatacttcttcccaccagagcacaggggacttaaaggcagaccaagatttaaagatggttcgtgactccttgggctgtcccatagaggcttgtcctttcatatggagctggccctaatggcctgttggaagtcaggttgtcttcttttgttatgagaaaggacgctaattggaggtcaatcttggtgaataaacattaacagaaacttttctcagcaaaccaaaacttcaactatggtacagaactttctttcttacagataataacaatcgtggttagtaaactacttaccattcagctgtattttgggtagtcctcctttatctaaattctactttgtatgacttaatatttctaagccagtttattagtaaaacctttttagcatcaattttaccacttcagatttctcctgtatccatagaacctttggctgtgagtaatttgtggtcagcacttcccggtcagaggacaatacctatttaccatctcacctgcataagtgataggacacacataaggtgaaaatcagggaaagtactgcccacatatgttcacattgtccatcattagataagagcccacctgtcaaacagcgtaaagacccaccctgttcctctcacccagggacttgattcctccctccacctaaactcatgaaaagaattcagcagatagcctctctgtgttgggggtggtggagtaggggtgctgttaaagacaggatagccagagggagaattgggggagtgatataattctatttcaactaaaacattttcaaaagaaccgttacaggggaaattgttatgtttttgaagaaaaagagaaaaagagaggcagatgagatagttttttattagagggccggcagagtagggagattatgagaaagtggaacaggggtaatggctgacagccatggccggtcgccatggagaggcagagagagcgcgtaggtgagagccaagaagaaacagagagagagagtagagagtaaaggagagagcaacaggaaagttggaacttttaaagggaagactgtgcatgcgcactgaggttccacgcatgcccagagtcctcacgcaggttgtaatgcgtagcgggtgacgtagtgatgacatagcatgatttcctgttcatggcctgactattgtcagggggcagggtctgtctcttaaagaggtagagcctatcagcattaaaccctgaacctttcagaaattatatcataatctcaaaaaaataagaggacttttttttaattttcagaaaaacaaacagaacatagggttcttgagctccttgtttgccacaaccttctccagtcctgtggagtgtattgctggcttttactctcattattaatattataaatttatacttttactacttctgcacctgtgtcttgttcaatcctttgcttaagacaaagaacctggacatcccttcacaggacacaggaaaacaacaccctggtaccaaggatggcactatctggaggtagcgaaatggtgcctttgagaggtgggcctttgtgagtggtccttaggcctttgcaggtgttccctcgaggagaattgtgggaccctgagctataatgtaaatgattttattcctgcagtgagggagctgcaccccagcaatcaacagggctgctggaccatgcactggaaactcaaaaactatgagctaaaataagtattttgtctttgtaaattaattatccctaatgtttccttagagtgatagcaatccaacagccataagccctatctacaaatgcagtgttgtgtttgattcctcagtgaattctggactgacctttgggaaaacaattcccagctttctatgagcctcaggaattgtctcctctgactcttctgggggattctttcccgctctatcacactcactgatgagcagtaggttaacatttcaggaaatatcctccgaagacctcctaggctctctctgcttcactgcccttcctcctgcactgtggcttcccagtgcaggcagactgtgggctctgcctatttgctttcccggagctatgccttggaaatctcggttaactagacagaaataggactgtgctcatgtcttttcttttctgggatcagaggtgactttcttgtgctgcctgatgtttaatgtttggcaactgtttttccagagtcttgcatgtccccttttgaactttacttatttgaggtgaaaggtaagtcatttttatcatttccatcttgtccatagaagttagttacacttcactgatatttctgaaaatgtctctaattccttttgaactgcactgttacctgatttttggttaaaaggatgggatttgagtctatcgctggtcctgctgcaaggaaacaacaggacatactaaaacttccaaagaattgtaagttagactcccttaagagttaatcctatggaccttctaatcatctggatagaaaaaatgtccctcaaaaagtaacttcagagtcatgatataaccaaagtcatgatataaccgaagatggaaagaataaccaatcctttaaggagatacatgcctagagacccttgaaactctcctctgggtgcaatggcttgctattaagcctgcctactttgtggagttctgactcagaaacaatgcccacttccccttttcagacacagggccacatcctgtaagctagcttgcccccacactccaggcactatactcccacgaggagccacgcccaaatgcagctgctcacagacttcccctgctgatcccgggctttcttcatctctcactcagaaaccacagcttcctcttttcgccgccatcaactgctcaatgtcgtttacttgctctgctttttctttaaaacaccaataaaatagccctctgaatctgtgtttaaattattttatctagaagactgacaccagcaaaaggcaacttgcattccctggtaacagatgcgtccctttctcttatgttgcttaaaatagagttgaggcaatcacacagtgtctgtgaaaaacagaacaatagtgtctgagttaggaatgcaaaagacagccaggtaactaatgaacaacacactagaaattaacaaagacaaaaaacaatatgtttcctgagaaaatgttttatgcctgagggttgtagattgttattttacttttaaattaaaaatcattccattttaagtgtttagaaaggcaaaatcagtctttttacttccagttcgaactcagggctcttgtccatcgggcacagaggtggagcaggagagacctcaagctgttgtggggcaggacatttatttgaggtagagcaagtaggggtctggataatctgcaagttgcatagtaacagtctcaggattggtgcacctctggactgggggtacctgtcctaaagtgattagctagctacaacttcaggaaacttgatacatctgatagcagttgctgtggttgctacattccatcctctcagtgaaactcattcagcctagcctctgattggttttttaccatctggggatatcttgtggtccacgggggcgagggggggaggagaggggtggaacacagcacatcctgctgagtccggagcctacatcctgctaggtcttttctgcaacctgtcacagctgcggaattgtcaaagcaaggggtctgggtgagggtctgggctcttcaattggaaaatcgaaacatgacaggcatccatggcttctccctgattgttcaggacccgaagcttgctttcaccccccacccccacaaccgccctagtcacccaagttccccacttccttaaaatacaagaaccaagccacagtggctccccactgctgaaagcaggcagagcttcaggacgagggaggtcccaaggcttctccttcttagctaagactgtgagaaaagagatcacgtccctgtcctgtctgtaaagctaattctcccgaggaaccttcaggagctatggcaggagcatagctccaggctctttggcttcagggctgtgttctgtgctcacacttctcaaacttcgcccagtccaatgtgcatctcacggccctctaccccagcccccattcccccccaccccgttcccactagattttaaaaacaacagaatacaggaaactggagaatagaaagccacattgaccagtgagttgcctcgttgtgaaaaagggtcctactcatgatgacaaagcatagggctagtgaggggaagccggtagcgggagatgcgtgctcactaggatttgaatccaaatccactgcttccctccactttccctggtggatccagtaagtccatttgtcttcagagtaagtaagttgctatggagaaaagatcagctcaacgtctctgcaccttgccagtcttctctaggcaagattccttcagctggagggaaaggtcccgaccgcaaaccagagcacgcagctctttttgcaatggacgcttttaggcaacttacggctttagttcttcaatagacctggagttttggggagaattatttggctgtgaaaaggtttaagaagaccgcaccttgatggagagtgagagagatagactcgtactgtcgttcctgaataggggggcgggggaatgcgggtctgctttccttgtcgactaaaacgaacaaaagccaaagtcaagctatgttaggggtttttaattttgtctcattttatagtgctcaagggagaacgtgttagcattttaaaaaaccggtacctgtaaatcctgtcactaactttatgaaaaaaaatctcaaacccattttctggtgtctgaagctgtgtgcagcaaacatccacaaatgtgttttcttgactgtgcttcacttcagaatgaaaatccacctcgtgactgatactgatttccttcgcagacatgcccagtattacccagagctgcactatctgccggaatagctggctccaatataaaccctcaccatcaacgtactttcccaggaatgttcctccagggactagaaggttgtagcttcctcaaaactcagccactctttatagaaaaaaaaaatgtttttaagtgatttctgtaccacgtcctcagtcacttccctgtctaagatatatattccaccaaaacaaaatataaattgagtttatttcacatagtattgcaacagtttaacttataggctattttcatgtggctgaatttctctacaatctgtctcttactattagccagcatggctaccatgatgttagctctaagaattcagaaatctaagccgggaagagttaggtgggagagctaggagagaagaggcccgactttttaaagtgaaagaaaagaagcaattaagtatcttaacgaagctcattatttttaaattttgtatgctgacaacagcaataaaaggaataaaatgaagaaaacgaacaaatcacttgtctggaaaggtttcctagggtgatttcctgagggtggatgttcctctcaagcacttctagggggtgagtacactctcactgtctagaccgaatttttttttcctggtgaaaccattgcagtttctttttataaaccggccctgaggggtggaggctggatccaaattacctggtgttagctgtgagcattagtggtaaggcggtaagcacatgggatgagtgggtactttcaattcattgttttacagtataaagtgttttagtaaattgaaacttctgttatctggccagcccctggtatggtgtaattgtaggcactggctttataaaccctacccttcctggtggagtcctttatggcaaatcctgctgttacctgctagaaaagaaagtattcttaatctgactttcattgagtggcactgttctgcgtctctggtggatataccaccacccatgcagactgcccagggggcacacacaggtttatttatattaacgcatttgagagtaggcagtggttgtggttggtgatgtattctgctaggtccccaagggcaggccagtgtgatgtctgaatgctaacaatagctgcttcttgttacattgtgtgatggagagaacaaggcgatcagctgggaaccggcttagatcaactgtgatactggcttctggcaaggctagctgaggaaaaccataaaatgagacagagtaagctggctagggagcaaagggtaacacaagagacaaaaagaagtgaggggggtgaaggaaaatgggtaatgaggaaaaagtgggaagagaggagcagagagggggagaaaagatggggtggggaagacaagcacttcattcagatcaataggtctggcttctccatctataaaatgggctggtgaaggcttcacatattttggtatcataagattcagaatagacaccagaagtgaagtgttttttttttttttttaacctcttgatccttttcatttgcacataagcctgtgaactgcatgatttctatttttttctgcccacttttttaaaaactgtccatagtatgagtcattagcagatgcaggacttcaagtagtctgactggctaaacaatgagtttctgctttcagagctggaaacatcctcgtctagtttctcattttctaactttcattttccctgtctctacgacctaatacgtgtccctgaggttaaatgttgatgttgataacagcatcagctgtactgttcactgagcagtcttcatgtgtggtcattgcctgaagattttatctacatgaagtatttttttaagttcatttttttcaatttcagtttacattccaaccgcacttctccctctcgcctctcctccatcccccctcaactcccccaaactctcccaaagggtaaaagcccattaagatgaggcaggagtgagcccctcccccctgcattaagggtgagcatggcattccaccataggaaatgggctccaacaagctagctcctgcaccagggatagatcctgatcccactgccaggggcccctcagacagtccaagttacacaactgtctcccacatgcagaaggcctagctgggtcccatggaggctctacatctgtcggtctagagttcatgagtatccacaagtttggttcacctgtctctgcagatttctccatcatggtcttgacctctcttgatcatatattccttcctccctctctttgactggattcctggaggttggcctggttcttggttatggatctctacatctggttccatcaattattggatgaaggctctatgatgacagttggggtattcaccaatccaattacaggggaaggccagttcaggcaccctccccactattgctagaagtcttagctggggtcctccttgtggattcctgggaatttccctagtaccaggtttctccctaaccccataataactctctctatcgagatatctctttcagcctggctgtggtggcgaatgcctttaatcccagcactcgggcagcagacacaggaggatctctacgggtttgaggccagtctggtctacagagtgagttccaggacaggctccaaagctacacagagaaaccctgtcttgaaaaacaaaaacaattccattgttctctatccctctcccaacttgaccatcccattccttcatgctctcatccctcaccccctcccctttgccaccccatccccagtttatccaggagatctcaactaattccccttcccaggatgatccatgtgcccctcttagagaccacatgaattatttttaatcttcacaacaatcagggttcgggtgcctgccaccacgtccaatttgtacagtcttagagataaaacctaggggcctagtgtggaggtcaccaaactggcaagcagcagtctgagtagagcccagtctcagaagcactcacgccagtctgcatgttttcataggatgtcattgtatcattacaattgctcctccttttcacaaacaggacattgaaatccagagaggcaaagtggatttctttagtggctcattaccgatagttctatataggaagcttggggtccccttccattgtggtggggtgtgagacataaacacagtctttagatggcttcatttgactctctgtattagttatataacagtctgaagaaactatctaggagtaaacattctgcaggtgaatcccctgttcttttcaacagtgttttgtgtaaattaaaagagattttgaacgcataataaatcaatgtgtaatggtgcaaatttataatctgggtattcaggaaggcaaggcaagaagatagcattgtttttcttcttttactttgacaaatgtatatttatttgctctgtgtgtatttatatgatgtgtgggagcaaggacaggcatgtaccatggttcatgtatggaagtcacatgacagcttcaggggttcgtcatactttgtttgaaacagactttctttgttgttcacttctttgtacactgggatagctgttccaggagcttctggggttctgttttcacctctcaccttactttagaaatattgagggtatacaagaaagcactcggtctgcttatgtgagctctggggtttgaactcaggtcttcatgtgggtggcagatcctttacccactgagccaatgccataccctgaatacaatgttcaaatccaccttgggctacacaagaagatgtctttttttaaaaaaaaaaaaaggtgaggtatgcacttcagtagtattgatgcaggaagaaacttggagtagtaagattgatgctttaaataatttactatgatctagagacaccaggtaagacaacacctgctgactttaacaccccctaaagccctctcaacagccaacaattcacccccttccctgagctccattcctggccctcaactttggcaaaagacttctgctttaactgaggccacactgtgctaggagccccagagaccaagcagatactcagaaccccagaggccacacaggtaccacaggtatgtgcaacccaagaagcaacattggcacacaaaacaccagaggtcatacaggcccagaaacctcagtggagacaccttactggacctggagactcagtggtcaccagaatcccaggccactcagtccaaaagaccagagaagaaccagaaaccaagggaaaaaccacccatcaaacaaaaataaactcagaaatcagaaaaccaaacaatccaattaaaagatggggtacagatctaaacaggattctcaacagaggaaattcaaatggctcagaatcacttaaagcaatgttcaaaatctttagccatcagggaaatagaaatcaaaataacactgacattccatcttacacctgtcagaatggctaaggtcaaaagcacaagtgaccactcatgctggcaaggatgtggagaaaggggaccacccttctgttgctggtgggtgtgaaaacctaaacagtcattttggaaatcaatatgggagtttctcagaaaattgagacttcatctacctcaagacccagtataccattctaaggtatctatccaaaggacattctaccatatcacaaggacaattgctcacctatgttcctagcagctttattcataatatccagaaactggaaaaaaaaaaaacctagatgtctctcaagtgaataactggtgggggaaatgtggtacattgctgttaaaagcaatgacatcatgaaatttgctggcaaatggatagaagtagagaagatcattctgagtgaggtaacccagacccagaagacaaacatggcttgcactcacttagaagtgcatattagctgtgaagtaaaaggtaaacatgctacaatcaacagaccctgagaagctaagtaacaaggaggtctcaagggagggggacacatgaatttcactgtgtttaaattgttaaaagtgtgacttgggatggggacctgagagatttaaggatgacagtgtatgtggagtgtacaagcgtcaggggctcagctgatagagagctcgcccttcattcacaaagccctgggtttggtcaactatactgcataacgcaaatgtggtgcacatgccttcagtctgggcagttggaagggcaggtcagagaaccacaagtttaaggtactcaactcctcttccttcccctttctgtcccctcccttattttcatctctactagaaaaaaaatgttataagtgaagctctctagaatatgctctctagagttctgtggccttgagtaagagtctaacctctttagaatttccagttctttatagataaagtagaatgctgtctcttaggactgaacaaactatgtgagcacttaaaacatggaatggcatagcacatacctactctattcatttgtggattatgtgttcttaaaaagatttttattaatcctatgataattccataaccgatgcagtgttccaggcattgtttagatggtggggtattgaagaccggtgttcctcctatcctcaatggtctttcttttcctagtgttatttgtcatagttaaagctttgaatatattatttaaattatttgtttgtttgaaagatacagaggaaatatgtcttcaaacaaaactcaaatagtaacctgggttgctaactattattttagataagctttcttgagttctttttggtactgtattacaactttggttccacattttacctagctccttttctacaggtttcttgcatcaaggtaagtagactacactttcaaattcctcagctttacaagaaactgatgtttgcttttgaattctgtctctgttcaaagctgtggacttggacacatcagccccttagccagagacactttcacctaaggcaaaatctacacagggcctgtttcccatgcagttgtggaagttagcaagtagagatcacttctgataagaatttggcacactattttcttgaggtgtgtctataaaatacgtttacattatgatcatagtaggctcagccattctatgttctgagtcacaaagtgatttccaattagacactgcctccttgtgtattggtaatgttatattcactgaaacattctcagacacttttactctttctgttatggtagatggatatgggaagtgcagttgttaaacaatttcatctatattaaataagcgtttcatttttaaaaattactatgctgtgggaaacaaaaaggagaaagagcgacgtagactgatgccctcttcgaaaactgattcctgacaagggtgtttagtctgtcttcttgatcctgagttgctctaactcccatcttcctgctgattcagcaggcctcagtggacactctgccgcagtagatggcgctgcagaccaacagtcttgacttctccgcccttgctgatgaggcaatcagagttcagcttcaggcctccaccccaagtaggtggttcacaagggtccagctcaaggctgcacagtagcaggttccaggctttttcgcgcgttttcaagccccgcccagtcatatctgtttgggtcctgtgccagcttgagacaattctaaccccagatagagaaatctggaaagtagaactgacattgacccatggcgcagcctgattggtcttgccatggatcacaaaaactatggattagagggctaggtggtggggtggggggtgggaggggggcggttaggatagcggtgtgtaggtggctggaggccacctatccgttcgcattggctggggattggctccgcggaggctgtgtttcacgtcacagctgctccctttgtaaaaggcgcgctttttcttgtggcagtgagccatttttgcgaatggaggaaaataacagaagcctgacagttgaatttgcaggaaactcagctctttgaggatttacctccacctcctggccgaccggaagcctggtaggacctgcgggcagtggaatgttgcagaaaagcctccagcttttttctttcagaaagtgtcgggaggagagtgagtgcagttccttttgggtggtgttggcagttcttaggcgagtaaaagaacaaagtcaaagagaaaggatgtaaagggttttttgtttgtttgtttctgtttgtttgtttgtttgtttcaatgctcaagaaataaggcttcaagttctaaaaaattggtaactgttcttttactgaaaatgcctcctaaaatgaactaacccgtgtttgtgtgcggcaaatagtcataaatgtgttttcctgtctgtgcttctctccagtataaaaacgtacgcagggagtggctgacagaaactgacttctttctcaggcatgttcagcatgccctggtggtgcagtcacgtgtactggcctagcaggcccctgagttagctatgctacctgttttcatcataaatgcaccacggcaggaatgttcttccaggaattacaacgttacaaatccctttgatatttcagtagttttctcaaagatacagctactgcctttaatagaaaatatcagatatttatttgtaggcctggcctcaaaatcttaggtttggtatacccacagtcttcatctgttaggatatgcttaccagtcctccacattatagcctgagttagaccagagtttagaataccagatcccgttgtctgtcctcagccttgctcttctactgcagcacgaccaaacagttgttaagtaactgtcacctccatcgaaataagtttagcttggttttatcaacaggtttctgagaggccacgttgcacattatcaacctccagctagaaccttgtgtgtctgtttcttcagtactctctgtccccaaaggtgagaaagacattattgcgttagattttcagtgtgtttttattgtgtttcacaagttcttaattaattttcttcctataggtaagggtaccttttaatgcatccttctattaccagattttgaaatgtttgtatgtttgtttaaaaatttctttttctttgaggccatcccaggcagcacagcaacacttgtcttaaaaaaattgtaaaagtgatatgtgtaccacaactgtgttaatgtttgatgtgaacaaactggcattgtcattatgtgagaaatattcatgaacttttagagacagaaagtgacacaggcttataatgtcaacgtgtctctaggtgtaatctgataaaattaaaagtgcatgtggagttctgggtgttgtccattggtagacttcttgcccagcatacatgaacccctaagcatcacatgaacctgacatggtggcacataattgtactgctagcacttgggaggcagggagacttgaaattcagttttcaaggccggtcttagcaacataagacattttctgaaaaaaaaaaaagaacatttaattatgagagtgatatttggattttcagtaactaattctttcccctgtctgtttgtattccccccttttctttctgttctttccatttctattagaaaatattcacaataaaaactccaaaatgtattctctggagtgtgtgtctttaaagaaattttaacttctctagagtttcatgtccttcataggtgaaataaggctaacaataccaatgtcatgtgcttgaaagaactcttttgtttaaatcattccttctcttttcagaagcagcacaaagaaagacacacacacacacacacacacacacacacactgaaaatctaagtaacaaacaacaccgctcactaacaaaacaaataaaatctaagtagatattgtgtttcctgagtatcattttagataactttcaacatttcttttccatatgtccctctaaatttctttccttctcagggtactaatttttttcctaactatccccctatattttaaccatccttccatgcccacctaagtgaagaccagattttaacatcaatgtgaatttaaacactcttttgcgttccccaattgtaaccctatcttgggtattggcatctgctcttggctgtgtttgctctggttcctgacacacagtaccttgctttgaatgttgggtggctctgctggatggacaaactttactgtgaagttatcaccctgtgagaaacaagactgaacagagagggaaagtggggtgtgggaccttgggaatatatatatacaatatatatcacttatgaagatacttgaaaccattttaaattagcaattcatctgagctatctgtttcatgtctaatccatcaggtgtatctcacataaggtcctggtgtgtgcaagaaaacaatatggagatcctacgctatttttctcaggtatgtctgtaaatactgctcattcatagcagacttagccatccttggccctaggtcacaaggttcttctgccaagaagccgtcttattgtggattaggagtattacagacctttcttgtccactttcttctttctagtttggaggatggcactgaaggagagaatcatagaataaatccatccatatcaaagtagccttcaattaaaataaaaagtaaaaataaaaagttccctgaaacaataaggaaaaacagatcaaattcattttgttatattaaactgggaaaaagcaaagttccctagcatggcactatctttctgagtatatctgatctacttaatcctaagaatctgcctgtacagtgctttgtagtttatgatatgactgtaattcattcttactataaccctgttaggcatgtgagaaggacttgcttctaaaagctctgttgcatgtgtgggtctgtgaggtctgctttctgactcagtgacatgattctaaaaggctccctgagctaaccaagaaggctgagaagtgtcaggcatttgagaagctccttcaaagatataagctcattatttttatgccatgttctagaaaactagaagatccaaacacttagaatatctatggaaaacttagatttgcccctgcccctttcaatccctcctctgtcctcgtctaagactgagcaagcttataaccacatacacaacttgttgttttctctcatacacaccaggccaggcacatgattaatctcagaactctgaacagagaaggaaagggatcataaattcaggatagcctgtgatatggtgtcttaacaatcaaaatgaaactcttaggtaaatatctagggcttctgccatggctgaggggatgaaagcctttgaagtgcaaacctaacctcctaatttagatacctggaatgtaagaagagaactgaccccccactattgtccttttccctccacatgagtggaccagcatgcttcaggcctgcattcacatacacaaactaatggtggtttttaggtgtctcagttgaatagtggaaagtatatccctgttcttgcaagtggtgagacgtgaatggttctcagtgtgttagactgaagagacattcttttttgtttgtttgttttttggtttttcaagacagggtttctctgtgtagcttggagcttatcctggcactcgctctggagaccaggctggcctcgaactcatagagatctgcctgcctttgcctcccgagtgctgggattaaaggcgtgtgacaccaatgcccggcttgaagagacgttctttgaggcttcccacacaagcttctttaaatttacataaccttaagttgctttgttttaaccagggtatcaatgttattgctaatgatgacaggcttaggcttcaccaggctccaccactgttattcccattgccataagtgacatcgttggtatgtgaaccacacctgttacaccaacagggaaatttaacctttcagacacaggaatcagatgccttgatttttaaatcattttctcaattttgataatttccccttagtaccttccctcttcccattcctggttttaagataatgtctcataacatgaatgttctgagtacagatttatagaacagaacatatagtctaatggaaaaaatattagactaactactggatttcagaaactcacttccttattggttatcatgtgattaagaaaggcacttagccaaagttcctgtgagctcactgagactgaagcaacatgcacagggcccgcatgggtctgcatcaggtcctctatatatatcatttcttccggttcactgtttgcatgggattcctgagtgtgcccacgagtgggtctctgattcttgtgccttctcttgggctgttttccttctgtttgttgtattcaattctaatgtgttaatctttgttccatcttcttaaattatattatttttaaaatgtgaaaaagaaaggaacttaggaaatgaacattacatacttgatcttctcatctactgaacagtggcattttttgttgttgttgctcctgtatatttaatggtgtttgagaactgacataaaaaagcaaaaattgtgagtgtttttgtggtagatgcaggctaaaacaagttattgaggagccatgaatgttgtgaatttgaggccagcctggtctacagatctaggtccacagtagccatgactattcagtgagattctgcctctcaattgtgtgggtgcaagtgcaaagaaattacaaaaaaattctaagcagtgcattatgcttatcaattttaatctattgtttaaaataataaacaagatacaaatgaaacactttctattggaactggtagattttgagacatctggatgagttatgtttcttctgcctgcttattgagaaaatatgacacatattttacacaaaaatcagaggaataccgttgtaagttttctaaagtgtctattatttctcttcaggtctccaaagagcaaaatgatcctataatttctcaaatgaaaaaggaatgtagacaaagaccaaaggacatgaccaacgaccaggaccaaagatcacatttggaacaaaaaactccacaagttcagaactcttcccaaaataggaaaattaccatcacttttggtataaaccattcaacctgtgagattacagatgaggagacagctagcttatatgaggcactaaacatccttgaccttgtcaaaagagagatagaaagacacccaggcaaagaaatgctggtatgtggcatagaaggaatagaagggttcataaaccttggtatgcccgtccgttgttttccagatggcagccatgtgctcattacattttccaaaactgaaagtgaggagaaagaagataatgaagtgtgtggtcgctttgaccagtcacctgctgagtgtgttgtattttacatacatgcagttgggaataggcaacaaagaattctgaggtgcaggaaacttcacaaggaggggaccaaactctgtgtctatggcttcaaaggagagaccatcaagaccactctgaggaaggatggcaggtttaattcctttgtagagagtgcccattggcgactcattaacaatgacaccaccatagcaaacacccagccagttgatgtgttacagggcaagctgtttcagattgatgtggagagaaaggagagcccttgggtggccatggcagctcagaaatctgagttagaggacagaaacttcagtgagttaaaaggatacattgtgaatttgtaccccacattgaaaagagaacgggaaaaactgagagcatacatcaaggaagagagtgagaaaaacaaggaaacctccttattcaaagcacatagagaaaacttcaggaagctgacccaaaactccaccccaggtaaagtcttcaaactcctttcacagctcagtgactcagtcgggctcatagtttggaacaacgatgggaacaggggtagtgctacttgcttcctttttaaggggctgtacattttcacttgtcgacatataataaatgacattgtaggggaaggcatagagccaagtaagtggccagatataattagtgagtgtgtaagagtgacatttgattttcaagtgttccccggcaaggaagacagctattgttttgttgaaccttggtttgaggtgtctgatgtaactcttgactatgctgtcctgaaactgaagaaaaatggacagcacattcctacaggactctgtaatagaacaccttctggatcacttagtgggtttatatatatgattggtcacccagatggcaagtataagattgttgatggttgtactgtgatacctcaagatgagcaaatgaggaaatgtgagaacattcaggggagagaagcattctgtggcagcgattctataccatatatctatatgtacacccaaagaagtttccagaaaaaaatccatgaacctggtgttgttacctgggataacgttttctattgtgggtcttctggatctcctgtgtttgatgctaaagggtcactggtaggcatgcacactgctggcttcatttgtgagtatacaagtggggtttctagtatcattgaattgggctcttcaataaaacacatccttgatgatattaaacaaaaacatgaaagatggtacaatgaaatttgtgtattcaacagtatgtagaaatactgagtctagaagactcaggactgagaattcagtcagttttagtctaatatatacatatatatatatatatatatatatatatatatatcacgaatttttaattgaaaatttttgtacaatatattctgaccacggttttccctccctcaacttcttccagatcttccccaccttcccacccacccaaatccataccacaaattttctctctcttgtaacactcatctaaaaagaaacaaaacaatgttgattcatgtttgctttaaattcaagctccatctaattagagcacactgtacttgtagcctgcggtgaagtcattgggtctctacacagtccaagattaagcagcactttcagaagttacagagaatcattttaatatgattgatgatgttcatggacacaactcaaggatacatatacctgagaatgtctctgaagtggctattctgaggttctcagttcaaatccctactttgcagtggctcttgaaagatactgaagatgaaggaatttcacaaaaatgcctgagaagtgaaaccatgaaaaagctttctgcaaagttggccaactgtggtctgacctaagagaactcataattatctttagctgtcaacttaaacctaaagtcatctggaaaaagtgaaatactactgatgacctttccggatcagactgacctgtggccatatctatgaagcattttcttagttcttattgatgtatgaggggcgagcacactgtgtgtagacccatccctaggtaagtggtcctggattgtataaggaagggagctgatcaagccagtaagcagcactcatgtgtttcgttccgtgagcttttgttttgagttcccaccttggcttctcttgattgtaacctgtaaagtgaaataaactctttctttcttaagttgcttttggtcagagtggtttatcacagtaacaggaaagctaactaggacagacactaaaaaggtagtaagataattcatggacaacagtctagagtggatatgaagttaaaaaaagtttcatcttgtagtagatcagtacttatccctagcataggaatggactttgggagcccattccacatagagggacactccctgagcctagacacacggggatgggcttaggccctatcccaaaggatacgacagactcttaaggcccccctatggaaggtctcaccctccctagggaacagaaaggatatgtgataggtaggattttagttggggggtgacaggggaagagggaagtgagaggaaactgggattgacatgtaaaacaatcttgtttctaatgcaaataaaaagtggaaaaaacttagaaatgggaaattttttagacagtaaacatgctaaattctttgtgtctatgtgaactgaatagagacagactccttgggaaaactacagaacagaccccacattggaagacactatgaatctggtacctagcgatgattctgggtatctaaaagaagtttatctaagctcatctcttgacaaattttcaaagttgaaacaagccataatgcatccatatcagaactttattgttggaagagaaaaaacttttttgagacagggtttctctgtgtatacttggctatcttgaaacttgctcagtagatcagactggcctcgaattcacagagatccacttgcctctgcctcgtgagtgctggaattgaaggccaggaccagcattgcctgcatggcttgagaaaatattttgaggaagaatataacaaaattcccagcattttagaaatccaacatgagctggagagatggctcagtggttaagaacatttgcagctttgttagaagcagtgtgatttgcagctctttcacggcagctcacagacatctgtaactccacttccaggggatccaacatcctcttctgccttcctccaggacactagacacacatgtgctgcacaaacatacatacagggaaacatgcatgtatagaaaacaaaggtaaatattctataaaaaatccatcttgctaaaggtggctggaaatccatgtacaggttcagtaaatgaaatagttcttgaaattagctcttttcttctctatgtagaggaccagatgagcctatcctgtgcttcttcgtgtccaggttttgaaagctgtagttccaagtacctccctcgcctgtttgtttcgtatgacgatgattatatagtctcacggtgagtgaggtcatagatccaagtttatggccacaattagtaataagcaaaggaagctttctgttgtgaagagctctggtcttctccgatgttatatttcccattgagacatagtttgtactgtatgatagaattctagagtataggatcaaatgggaagatagaggggctgaagagatagctcaattggtaaatttagtcagaccttgtgtagaaataaaaaaaaggaaaaagaattcaatgaatgaaaaggatgggagattgcagctcagtggtagaattcttaactcacatgtacaaggccctgagtttaatttctagaatcttggggaaaaggtaaggggtggggagagaggaaaagaaaaatgagagacatggttctgctgtgattctgaaatggtggacaagcagctcttggatgcaagggagactgtcccacctcaggggtgtataacttgatgagctaagatgcctgataaatcatcagccaccagaaccactccaagcccgtgtcttctaaagtcaagaagggaatttcacagcccaagggaggatggtttgtagaaagaagatgaaatatcagattagaggaagaagggaaaaacacagagatcccaggaaacaggacaccataaaacaattagtctacgggctttcctaggacttctggcagaaactgtggtaagccaaagagggtattcaggccagtcagcctacccaaaaggcgtccaagtgcctattagttcagtcatgaccttagtgtaccttccagtcagtggggcttgcattaaaggttattatataaatataacctcctttatatatataaatggagaagaaatgtaacaagaagctggagcaagaaccatggtgcactcctggcatttctggcatccagccagaacagaaccaaatgatcacccctaaaaacatacataccattatttgatatttgaacagaacatatttacacacacacacacacacacacacacacacacacacattttgttatgtattttaaaaaggacaaggtggtcgtggtggggtacatgggaggaattgaaaagagtaaatggaaggggagaaatgatgtaattacataaatctcaaaaccaaaaataaaatggaaggaagaaactaacttctactcagcacagtcgtgcatcacccaggggtaagagcaaaaaagagaaatgcctcctccttcctgctcctcttactttctttgttctataatttatttaactcaattgcaaaaccttatgatttcaatgcatattaactacatgtgtttggatatctcatgtttttcgtaccaagttccctttcgtatagtggtctatttttatatttatatcatgtctcagttaataccgagacatgacaaatgcttaacagcacatttgccatctgtggttctggaatgggcaccatgatcttcattaggaccgaaaaccgcagtaggcactcgggtgcctttgggaaacagattcatggtaagtcaattttctctgaaggcacctgtagcttcttcctgactctcaaagccttcagctgccacctacaggggctgtggctctctcctccccggaactcactcacttacctggccacagggattagtgaatctgcagcaaatgtacttgcaggacctgggtccccatcttttctctagccaggacttcaagacgcccgcggaccaagttcctgcctgtggcaccttgtgtgcccgggtagaggcaaggcgggaacccttgcaccctggctcctccccttagctccacgatcagatctacatctggtcttctaccgaccgcggggatgttcaaatactcacgaataaagaggaacctggcagaggaaaggcctgttctaatcagttctaaccggctgcgactggccaggaaggctctcgccgccgagtacgccactcctttcccgccatcatcagacggcacaagcgtagccaataggagctgtcgttctcttatgctaattaccgtgctttggcgcgcctttctcgccttcctcgagctgaggccgtactgtgacagacgtcctcggagccccgctgtggcagacagcctcgggagtcctcgtcaaacagtccgatttggagagaactctttgcttaggtgagttactcttagtttcgggctgacttagatctggggttggaataatgcaaaaaaaaaaaaaaaaaaaaaaagaagaagaagaaaaaaaaaaaaaagaaagaaaatagcattcagacgggcatcagggaggaaaagcagtgcacttgcatgctgtgggtcccgaagaggccatcgagcgcggcaccacttaaatctgtctgcagttttgggggactaaaataacaccagggctcaaggaagaacacattctggtgttaaaacctggcgtttgttctccctttatatgttacccattccgcatagaaagatagatactctcttggcctagacacaccggggaggcctaggccctgctccaaatgatatgacggactttgaagttcccccatggacggcctcaccttccctggggagcacaaaggggatgggatagggagttagtggggggcaggggagtaggggagggagagggaactgggattgatgtgtaaaacaatctggtttctaatctaaataaaaatagaaaaaaaaaaaaagggtctgtaaaccaggtgactcacttcaggaaatgtccctaaaattaatttctcagggtctaaatgtgtgtgtagcaaatacccgcaaatacattttcttgagtgggtctctggctagaataaggatacaagatgtaagtgacaatagccgatttcgttcttaggcatgctcagtttgtagagtagtgccattggttctttgtagcagggtactacagtaacctgacttagtctcctgctctttaaatcatcattaatgttgaggagtgttctgccagggaactacaaaaagttgcaaatgtaattatcatttattccactagtatgcacaaatatccagtcactcttcatagaagacatcaaagaacaatttacatcacaagtttttaatcctggtctaaatcctaggtttggtatagacaccaatccgaatctgttgtccaatcctaaccaccaccaccccacccacccaccccgcattaaagcccgagttaaacaagggcacaaagtcccacaggcctacactcgtctcagcctgactgtgttctctctcagtactgctaggactgtgaagtgcttgctctcattaccccaagagcagtaatccaagatttgttttatcaacaggattctgggagacccccccccccccaaggacctaggaagtcaacatccacagttcctgtgtgttctgtagtgaagtcacctcagccttcccttgcggtcactcttggtttcagaggcaagaaagtaaatactgtattagtcattttgcttctgctgtggtttgtgtatatttttatttctactcgtaaaaataacagtttaggaacctttgtgattatataatcagttgttgaaaagcttttaggtttggcctccccaaaatctacctgtaagtagcaatactgtagtttgtatctgtccttttttttttttttttgtggtttggtttggttggttttatccttgagtaaaacaagtacactgagagcagacatgggctcttgagaatctgatactcaggctgactgtgtgtgctatgaagctgaccacagagggggaatgctcccttctagagataccagagagtccaggacatcattctttctgaataactgaggagtgctcaggttagaaaggccttccaggttggcaggggaaagaaaataaccaatattttatttaaactgttcgttatttgggaggggacaccaacagaaaaatagttgggggggggactttttaaagcaaatggcacatttctttaattccagcacttgagatgtagaagcaggtggatctctaaattcaaggccagcctggtctttagagtgagttccaggacagccaaggctacgtagagaaaccctgtctctgaattaacaatcagacaaaaaaagaaaaagaaaacgaaagcagtaactaaggctcctaaataccattttctttgcatttttctgatttttgataactcttgctaaatttcatttcttttctgggtactatccagttttccctttcctgttctcctacaatttgttatccctttccatctctatcttcaatgaagaccagaattccttaaataattagtatgtttttgtgtcctctgtgtttcaagatttggactagggcacttcaccttcttttccagagtactccgtctgaaacaaacaaaaacatccgaatggaacctgtgttccgtgatagttctgttggtcaaccattagagaccatttctattaagattttgatattttggtataatgcctgacatacagtgctttgcttttactatttggctcattatgcttggtcgataaactacctgatgctaacaccttcctggagcatgaaaattgaagaagaaagatatgatttggaacttcaggcatttttccccctagatacactatgtgatggctgggaagatactactgtaatatgaactttttgaaaatactgtttcagttggagcatctgtttcatctccaagccaccatgagctatagcaagcccaggtctcaggatttccatcatgatttaaggaaaaacatgaaaatcaagtaccatcagcctcgggtatgtctgtaaacatttgtgtatttgtgggatgtcttcatactagactatatctggctagatcctaggccacataatcttcctgctaagaatggctcttgttagtattgggaatattacattcatagaaatgtgtgtgactgtagaagctggaagattgcatccaatgccctagagctggagttatagacagttgtgagctgctataccatcgtttgctatgtttggcaaagataaaaaattgcattgctgaaaataaaatacttgaaaaaggatttatggaagctgatagacaggtaatttcttgaaaacaattgtgtttcttactgcccatttgtttgagaaaggggccatatgcaataggaagagattatctgatagataacctagtgggggctagacttgtattttggatcttgagttaaatcatggtttaagcatattcactgtttctttaattacatactaatgcaagaaactaaagattagaattggaatccaaattttaaagtatctgtcatttctttttaggtccttcaagaagaacagaatgatcccaagatgttgcaaatgcaaatgggatcccgaaaaagaacaaatgagatacctaacacacaagagcaaggactctgttcttctaagaaaactccacaagatccgaccactcccctaactaaaaaaatcaacatcaccttgggggtaaatgccaagacatgtatgccctgttttatccaggaggagacagctagcttatatgaggcactgaacatccttgaccctgtcaaaagagagatagaaagacacccaggcaaagaaatgctggtatgtggcatagaaggaatagaagggttcataaaccttggtatgcccctccgttgttttccagatggcagccatgtcctcattacattttccaaaactgaaagtgaggagaaagaaaataatgaagtgtgtggtcgctttgaccagtcacctgctgagtgtgttgtattttacatacatgcagtcgggaatagggagcaaagaattctgaggtgcaggaaacttcacaaggaggggaccaaactctgtgtttatggcttcaaaggagagaccatcaagagcactctgaggaaggatggcaggtttgattcctttgtggagagtgcccattggcgactcattaacaatgacaccaccatagcaaacacccagccagttgatgtgttacagggcaagctgtttcagattgatgtggagagaaaggagagcccttgggtggccatggcagctcagaaatctgagttagaggacagaaacttcagtgagttaaaaggatacattgtgaatttgtaccccacattgaaaagagaacgtgagaaaatgagagcatttatcaaggaagaaagagaaaatagtaaagaacaatcttttttcaaagcccataagagaaagttcagggaactgacaaaaagctctattccagataaaatggtcaaacttctttcacagttccttgattccactgggctcatagtttgggacaataatggaaacaggggtagtgccacttgctttgtttttagagggctgtacattttcatttgtcgacatgtgctaaatgacattgtgggagaaggaaaagagccacttgagtgtgtagatctaattagccaatgtgtaagggtgacatttgatgaggaatattgtaaagagccaaactcaaacttcaacagttgtttttgcattgaaccctcgtttatcatatctgatgtaactcttgactatgctgtcctgaaactgaaggaaaatggtcaacaagtgcctgccggactgtataatggaatagctctttcacatcccagtgagttggcatttatgattggctatgaaaatggacaaagggttattgatcgttgtacagtgatccctcaaggtaaactaaaagagaaaaatcgacaatgtgttcatggagcagaagcagcagatcataactattctttgaagcacctcctccttttgcatactaacagaagtttccccaaaatgagtgaaaaacctaatgactttacctataatactttttattgtgactcttctggatcgccagtatttgactgtaaaggttctttggtggccatgcacactgctggcttcatttgtgagcatgaaaacggagtttataatatcattgagtttggcacaatgatggaatccatccttgatgatattaaaaaaaaacataaaatatggtataatgaagtttttgcaaatcaggacatagaaatgtgcgatgaagtctatataaatgaacaagatgtagaaatgtgtagtgaagagttttgaaggctggagaaaatttattcctttttgaattaggttttctacagcaatgctacataaggtaaagccaggtctcaagcgaatctccattatcctgaccattcttagtctctgaatgtgggtgccagttaggaggcctgggcaatctatgggacctctaacagtggagccagtgtttatctctagtgcacaaattgactttgggagcccattccctatggagggatactattggcagcccagatacaccaaagagggtctaggccctcccccaaaagatgtgacagactttgatgatcccctgtggaaggcctcactttccttggggagtgggtggggggttactggggggattgagggggaggcatgggaggatgggaggagagggaactggtattgatatgttaataagagtgtttctaaaataaaaataaataaaagcaagaataacatttttctaaagttgtactatgtttaaatatgtaaaaaaaaaaaaataacctgcttggagtcagactccagaagcttgcaagataagagataatataataggggagacattattagttcaaatagaaatcagacactaggaaaatgtctggagagatacaaagatgacaccaactaacaatccaagcatagaggagaggctaccttaaatgccctctcctgataatgagattgatgactaattcatatgccatattatagccttcatccagcagctgatggaagtagaagcagacaccacagctaaaccttgaactgaactgaaatccagatgcagagaaggactgatgagcaaagggatccataccagactagtgaaacccacagaaacagctgatctgaacaaaggaaaactcttggtccccagactgatagctgggaaaccagcatgagactgatccagatcccctgaatgtgggtgtcagtgaggagacattggaaatctatggggcttcttgtagtggatcagtacttatcgctaacataggaatggtctttaggagcacatcacacatggagggatactcctgagcctagacacagggggttggcctaggccctatcccaaagaatatgacagatttgaatatggaaggcctcaccctccttggagagtagaaagggtatgggatgggtagggcgttagttggtttgggggcaggggaggaagggagggtgagggacctgggattgacatataaaataatcttctttctaataataaaagtagaaaaaattagcaaaacaaacaaacaaaaaacagaagtttgaaccagacagaatagctcagttttgccaaactggatttccttcttgcctcttgctgtttctctgccgttagtaaatgttgcaggaactcccgcaccaagtgaactttcagagatagaaagaatggggggccatctttcttcttcatcttctgacataaatgaccagagaaaagctagtgtgtgaaaatcacagtgttggtgtgaccaacatagtgaaaagggcctcttagacatgttaaaatactatagtcaggaaccccagtacatccaaatctgcatctaatagcctaaacctagtgacataatttactcaagataaacacagtgctccatggcacccgaaggacagtataaaagcagagaccaagagcaatgctctactcagcatatcttcaggactgttgaagatactggagagatgccatcttgacttgccctgtaactggagagtcttctctacgatcctgaccctcaaataagagcctactgttagagactagactgctaaaatacatcacatggctgaacagcctttgggagaatgccttaagttcatagttaggaaattagcatataaatccctgcacagtaaaatgtaacttttgctataccaacatcacgtacctgccttcttgcttgcaactgttggtgacccccagtggtgtgtgcagccaccagcttcatggatagccagacctacagcagtaagtcaatcaggcctgcagcacttggtatttgctctgatcctgcaaggagactgttgtggtagggactcctgaattgcatctgagagtgtcactgcttggcatcggtattccaatgctatctcctggacttactgcttttaccatcccaggaattttcagcacctggtcccttctgaatctcttttacctggaataaactttgatttaccttgcttctaatgtatgtatgtatgtatgtatgtatgtatgtatgtatgtatgtgtttatatgtattatatatctgatatataatacatataatgtagtatatatgtgtgtgaggggggatgtccttctgtatatatgtttctcttattggttgatgaataaaacaatgtttggctaatagccaggcaggaagcataggcggggtgatcagatcaggagaaggttgggaaatccacggttagcctcgatctgcttatctgtgtccctatttcaccacaaagaaccctaataaccacacctactccttccctgtgcattcagaagcaacacatgccatactcctagccctccagaggcagagtagggaaaactgcaagtttcccaaagcctatctatccggcttacacagtgttttgttttgttttgttttgtttttttctagacagggtttctccatgtagctttggagcctatcctgtcactctctctggagaccaggctggcctcgaactcacagagatctgcctgcctctgcctccagagtgctgggattaaaggtgtgtgccaccaacacctagcgcctacatagtgtttcaaagaacaaacacaacaaaagaattgaaaacttttgtattttcgcctgtcctacttagtttcaaccatcatactgacatcctccaaagttatccaagggagtctcaactggggaattgtccagatcagactggcctgtgggcctatctgtgaggaattgtcttgatgattgatataagaggatccagcccacctagggatgttttattcctgggcagaatggcctagagtatgtaagaaagctagctgaccatacgcctggggagccttcttctgtggtctctattccagattactgccttgagttcctgtcctggcttcccttcatcatgggctgtcagctataagacgaaatatacctttttcacctccaagtagcttttggttatgatatttatcacaacagatatcaaattagaacactgcctcagaattgtttacatagttggaatttgactacagtattccagtgggatgtgacaaggatgttaggacagcatgttctccaaagagatgcattttgagagtttctatgcacagacaaataaatttgaattatattatgttctttttaaacatagatattagtgaacttttttcaaaaagagctttaacatattagatgccaatcatgttttgcagtgtcatacaatgacaacaggcttagtcttcaccatgctccatcattattgttattatttctagagagtggtatttctagagagtggtatttctagagagtggtatttctagagagtggtagcatacctcttggcatccttgccatcatgaatactatatacaaaagtgacaccttcaaacacttgaattagatgctttcagtttttggtattttagtaatcattcttcctacccttgttccttttttaaattttaatattttatttttgagaattttatatacaagtactcaacttacataatttttatgcctccctcttcatccctcaactattgttgggttccccaatattccatcccaaattttgtgatctctcctccctgaattattattgttacatattcatccatgcaaataggggtgtgagtgtgtgtgtgtgtgtgtgtgtgtgtgtgtgtgtgtgtgagagagagagagagagagagagagagagagagagagagagagagagaaccatggaaataaaatacaggccagctttctcctgctctatctccaaacaaccctagtcacagaaacatgtagaactcacagtgtggattccctttgtgttggtgtgtggccataagttttgtaggtgccttgagctgtagcagcagcaagtcagggtttcagtatctggcattttttgatgttgtaaagagctacagtgatggcagccattccctaatgcagcttcctgtcttctttatgtgttcgtggacccagagataccattgttgcctcctaaatcctgctctgagcatcctaatgctttcctttcctttttatttatttattttttttgagaccagggaaaagtaattttattaggtttgatgatattttcatactgcttcaaaatagaatatttgatatttccacccattgtcttcatatgtgtatttgtgcttacatatacatataaacctagtaatattaccaaacaatatccttccttcctacttctcatagcttctactatattctttttttctctagattttttgtttaaatcagaaacaatcttattttacatgtcaatcccagttctctagccctcacatactaccatgcccccaaccaaaaccccatcccccttctgctcccctgggagggtgaggctttccatgggggatcttaaagtctactacatcatttgggggatggcctaggccctcccccgtatgtctaggctgagagagtatcctactttgtggaatacgctcccaaagtccattcagacactagggatgaatactgtttcactaccagaggccccaaagactgctcaggcctcctaactgatccccacattcagggggccaaattaagccaacactggtttcccagctgtcagactggggaccataatcttcccttgttcaggtaagctgtttctgtggattcctcagccaggtcttgacccctttgctcatcacacctcccactctactactggattccaggagttcagctcactgcttagctgtgagtgtcggcttctgcttccatcagctactggatgaaggcactaagatggcatgtaacatagtcatcaatctcattataggggaagggcattaaaggtagcctctccactattgcttacattcctagttggggtcatccttgtagatctctggacatttccctagcgttagatttctctttaaacctgtaatggctccctctattacggtatctcttttcttgctctcctctattcttcccctgactcaatcttcttgctctcttgtgtcctcctccccactcctcttctacccatctctatctcctaactccctctcccctccccccatgctcccaaattgctcaagagatcttgtccttttccccttctccagggatcatgtatgtcactcttagggtcctccttgtttcctggcttctctggaggtgtggattgtagacgggtaatcctttgcactatatctaatatccatatatgagtgagtacataccatgattgttttttgtgactggggtacctcattaaggatggtttcttctagttccatctatttgccttggaaattctattgtttttttttttcagctgagcagtactccattgtgtaaatgcaccacattttctttatcctttcttcagctgaggggaatctaggttgctttcagattctgactattgcaatagtgctgctatgaacatagtggaacagatattcttgttgtatgtaggtgcatcctttgggtatatgctggaatcctgaggtagaattgctgggtcttgaggtagactgatgcccattttcctgaaaaactgccatactgatttccaaagtggtcgtacaagtttgcactcccaccagcaatgaaagactgttcccctttactgacatcctctccagcataaactgtagttggtgtttttgattttagccattcttacaggtgcaagatggcatatcagagttgttttgatttgcatttcccgggtggctaaggatgttgagcaactccttaagtatcttttggtcatttgagattcctctattgagaattctctatttagatctgtaccccatttttaattggattattaggtgttttggagaatagcttcttgtgttctttgtatatttaggagatcagtcctctgtcagatgtggggttggtgaatatcttttcccagtctgtgggctgtcgttttgtcctgctgactgtatcctttgcattacagaagcttctcagtttcaggaggtcccatttattaattgttgatctcagtgtctgtgctactggtgttatgttcaggaagtagtctcctgtaccaattcattcaagggtagctcccactttctcttctaagaggttcagtgtggctggatttatgttgaggtctttgatccattttgacttaagttttgtgcatgatgagtgatatggatctatctgcagtcttctacatgtctgaatccagttatgccagcaccatttgttgaagattatttcttttttccatcatataaatttagcttctttgtcaaaaatcaggtgttcgtagctgtgtgggttaatatcagggttttcaacactattccattgatctacctgtctatttttgtgctaataccaaactgttttcaggattatagctctgtaatagagcttgaagtcagggatggtgatgcctgcagaagttcctttattgtacagggtggttttggctatcctgggtcttttgtttttccatataaagttgagtattgttctttcaagatctgtgaagaattgtgcagggattttgatggggattgcattgaatctgtagattgcttttggcaagattgccatttttgtgctggagagatggctcagaggataagagcactgactgttcttccagaggtcctgagatcgattcccagccaccacatggtggctcacaaccatctgtaatgagatctggtgcccttttctggtgtgcaagcatgcatgcagtaattgtatacttaatagataaataaaatctttaaaaaagattaaaaaataaaaaattgcatttttactatgttgaccctacctatccaagagcatgggagatctttccattttctggtatcttctttaatttctttctttaaagactcaaagttcttgttatacaggtctttcccatgtttggttagagttccctcaaaatattttatgttgtttgtggctattgttaagggtgatgtttctctgattgctttcacagcccatttagaatctgtacagcagggctactgatttttttatttaatcttgtatcctgccactttgctgaaggtgtttttcagctgtaggagttccctggtagaatttttcaggtcattcatgtaaactatcatatcatctacaaagagtgaaaatgtgacttgttcctttccaacttgtatccccttgatctccttttgctgtcttatggctctagctagaacttcaagtaccatattgaagagatatggagagagtggacagccttgtcttgttcctgattttagaagaatctcattgagtttttctccatttaatttgatgttggctgttggtttgctgtgtattgcttttattatatttaggtatgttcctgttatccctgatctttccaagacctttatcatgaaggggtgttggatttttgggattgtattgaatctgtagattgtttttggcaagattgccatttttactgttgttcttacctatcctggaacatgggagatccttccattttctggtatcttctttaatttctttctctaaagactcaaagttcttactgtacaggtctttaacctttttagttagcattgtcccaagatatttaatgttgtttgtggctattgtgaagggtgatgtttctctgatttctttctcattcatttatcatctgaatatagtaggactactgatttttttttagttaatcttgtatccttccactttgctgaaggtgtttattacctgtagttgttccttagtagagtttttcaggtcagttatgtagactatcatatagtgaaagtttgacttcttccttgccaatttgtacccccttgatctccttttgtattcttattgctctagctagaatttcaagaacaatattgaagaggtatggagagattggacagtcttgtttgttcctgattttagaggtattgctttgagtttctctccatttagtttgatgttggctgttggtttgttgtatattgcttttatcatagttaggtatgctcctgttattcctgttctctccaagacctttatcatgaagaggtgttggattttgtcaaaggctttttcagcatctagtgagatgatcatgtggtttttctttctcagtctgtttatatcgtggattacattgatggattttcgtatgttgaaccatccttgcactcatctgatgaagactacttgatcatggtgtatgatttctctgatgtattcttggattcagtttgccagtattttgttgagtatttttgcatcaatgttcaggagggatattggtctgtagttctcttttttagttgtgtctttgtgtggcttgggtatcaaggcaattgtagccacatagaaagagtttggcaatgccccttctgcttatattatgtggaaaaatttgaggagtactggtattagctcttgtttgaatttctggtagaattatgcagtgaggccacctggccctgggcttttttgcttggtagacttttgatgactgcttctatttccttagggttataggtcaatttaagttgcttatctattcttgatttaattttggtaaatgatatctatccagaaaagtgtccatttcctgtagatttttgaattttgtgtaatacaaattttcaaagtatgacctgatgattctctggattttcccagtgtccattgttatatcccccttttcatttctgattttattaattagcatgctcacgctctgccttttggttagtttggatagaggtttgtctatcttgttgattttctcaaagaaccaactgtttcattggttctttgtaatggtttttctagtttctactttattgatttcagccctcagtttgattattttctggcatctactcctcccagaggcattggcttctttgtgttctagagctatcagttgttctgtcaattctctggtgtgactattctccagtttcttcatgtgggcacttagcgctatgaactttcctctaagcactgcttagtgtctcataagtttgagtatgttgtgtcttcatttttattaaagtctaggaagtctttaatttctttttttttatttcttcctcaacccaggaatgttgtaattgggtgttattcaatttgtaggttttccacattttgtgttgttgttgaattctaacttttaagcatgaatgtcttataagatacagggggttatttcaattttttcctaccttttgaggtttgctaggttgccaagtatgttgtcaattttagagaaggttccctgtagcgttgagaagaaagtatattcttttgtttttgaatggaatgttctatagatgtcttttaaacccaattgtgtcataacttctggtatatcccttgtttctttgttaagtttctgtctggtggtcctgtctagtggtgagagtatcgtgttgaactctcctactataagtgtgtgaatttttatgtgtggtttgagctttagtaatgtttcttttacaaatgtgggtgccttcgtatttggggcatagatgttgaggtttaagacttcatcttgatggacttttcttttgaagagtatgaaatgcccttcttaatctcttttgattgattttagtttgaagtccaatttgttagatattagggttgcacaccagcttgtttcttgggcccatttgattggaaaatcttttcccaaccctttactgtgagataatgtgtgttttgaagttgaggtgtgtttcttgtatacagcagaaggatggattctgtcttcatatccaatctgttagcctgtgtctttttataggcaagtaaagaccattgatattgagcactattaatgtccattgattgttggttcttgattgttttgaatttattattggtggttttattgtgtggattcctccttcttttagtgtttggtaaagtgggattatctattgcccatgtttttgtgagtgtagttatcttcattgggttggagttttccttccagcactttttgtagggctaaatttgctgatatgtattgcttaaatctgattttgtcatggaatatcatgttttctccatttatagtgtttaaaagctttgctgggtacagtaagggcatccatgttcccttagtgtttgtaggacatctatccaggaccttctggctttcagtttccattgagaagtcaggagtaattctgataggtccacctttatatgttacttggcatttttcctttgcagctcttactattttttctttattctgtaagtttggtgttttggttattatgtggcgaggggacttctttttgtggtacagcctatttggtgttctgtaagcctcttgtacttccataggcatatctttctttaggttggggaagttttcatctataattttgttgaatatattttctgtacctttgagctatatttctttaccttcttctatatcgattattcttaggtttggctttttcacggtgtcccatatttcctggatattttgtgttagggatttgttagacttgagattttctttggtcgaggactgtatatcctctagcgagtctttaacaactgagattgtctcttccatctcttttagtctattggttatactcatgtccttagttcctgattgtttatccagcctttctatttccagcatcgcctcattctgtgttttctttattgtttctatttcagctttcaatgccttgaactgtttcaattgcttccttcacttgtttcattgttttttcttggctttctttagattctttaagagatttatttatttcttgaagtttttggtttttttcttctatttctttaaaagaattcctcctttcctctttaagggtctctatcatcttcataaagtagattttaagattcatctcttcttcttcctctatgtttttcttttcagttcttgctggtgtggagtccttagattctggttgtgtcatattggtctttctgttgttgagtatttctcattgtcatcttcccatctcttcttccagtgggtgaaggtggagtcactctatctcttcttgtcaccaagtggcatacgtgggccaagacttcagtgtctacatttctaggtggtctggcctctcctggtatcctcagcagaggtcagggcagcctcagaaccaagaatgaggtgtttctggactcaggtaggtgctacttgtctgggcgggtccactctatgccaggaacatgcccacaaagatccaagaaaggggtgatggtgggagttaggccagaggagaggggacactcctctcagcagaggtcagggcagcaggggaactgagagtgaggtgtttccttactcagggaggtcctccctgtctagacgggtccactctaccccaggagtatgcccagaaagatccaaggaaggggtgatggctgaagtcaggccagagcagaggggacactcacctcagcagaggtcagggtagccagggaaccaagtgaagatactttctttattccattgtataactctagcttctttgtcaaaaatcaggtgttcataggtgtgtggttttaaactcgattccattggtctacctgtctatttttgtgccaataccaagctgttttcaggactatagctctataatagagcttgaagtcagggatggtgatgcccccaaaagttccattattgtacagggttgttttggctatcctgggtctttcgtttttccgtataaagttgagaattattctttcagtgtctgtgaagacttgtgctgggattttttatggggattacattgaatctgtagattgtttttggcaagattgccatttttactatgttgatcctacctatccaagattatgggagatctttccattttctggtatcttctttaatttctttttttaaagactcaaagttcttactgtacaggtctttcactttttggttggcattatcacaaagtattttatgttgtttgtggaaattgtaaagggtgatgtttctctgatttctttctcattgcatttatcatctgtatatagtagggctactgatttttttttttttgagttaatcttgtatccttccactttgctgaaggtatttatcagatgtagttattccctagtagagtttttcaggtcacttatgtagactatcatgtggtctgcaaatagtgaaagtttaacttcttccttgacaatttgtatccccttgatctccttttgttttcctcttgctgtagctagaacttcaaggacaatagtgaagaggtatggagagagtggacagccttgtcttgttcccaattttaagggaatcactttgagtttctcttcatttagtttgatgttgtttacataacaaaaacaataagtatattgtttttattatgtttagatatgtccctgttatgcctgatctctccaagacctttatcatgaatgggtgttggattttgtcaaaggctttttcggcatctagtgagatgaccatgtgattttcttcctcagtctgtttatatgctggactacattgatggattttcatatgttgaaccatccttgcatccctgggatgaagcctacttgatcatggtggatgatttctctgatgtattcttgaattcaatttttttattttattatatatttgaattacaaacaagattgaatttcatgacaatccagttcccttctccctcccttcctcctctatcaccccccaactaaaatcctatcatatttcctttcttctaatctacacctgactcaacctttctgcttcctcatgacctctgcatccttccttttcttcccttctcacactcgtagcttcctcccctgtcttcccatgttctcaatttgctcaggggatggtgaccctttccccttctccaggggacaaagtttgtctcttttagggtcttccttgtttactagtttctctggcagtttggattgtaggatggtaatcccttactctaagtctaaaatccacatatgagtgaatacatatcatgtttgtctttttgtgattgggttacctcactcagaatggtttcttccagttccatctattttcctgcaaatttcgtgattccattgtttttttccccctgagtagtactccattgtgtaaatgtaccacattttctccatccattcttcggttgaggggcatctaggctgcttccagtttctggctattacgaatagtgctgctatgaacattgttgatcagatgtctttgttgtatgaatgtgcttcatttggctatatgcctgggagtggaattgctggatcttgtggtagactcattcccaatttcttgaggagtcgccatactgatttccaaagtggctgtacaagttggcactcccaccagcagtggaggagtgttcctctttctccacatcctctccagcataaactgtcattggtgtttttgattttagccattctgacaggagtaagatggtatctcagagttgttttgatttgcatttccctgatggctaaggatgttgaacactttcttatgtgtctttcagccattttagattcctctattaagaattgtctatttagttctgtaccccattttttaattggattattaggtgttttggagaatagcttcttatgttctttgtatatttaggagatcagtcctctgtcagatgtggggttggtgaatatcttttcccagactgtgggctgtcgttttgtcttgctgactgtgtcctttgcattacagaagcttctcagtttcaggaggtcccatttattaattgttgatcccagtgtctgtgctactggtgttatgttcaggaagtagtctcctgtaccaattcattcaagggtatttcccactttatcttctaataggttcagtgtggctgggcttatgttgaggtctttgatccattttgacttaagttctgtgcagggtgaaaggcttggatctatctgcagtcttctacaagccagcatccagttgtgccagcaccatttgttgaagaagccttctttttcccattgtataactttagcttctttgttaaaaaactaggtgttcataggtgtgtgggttaatatctgggttttcaactctattccattggtctacctgtctatttttgtgccaataccaagctgttttcaggactatagctttgtaatagagcttgaagtcagggatggtgatgcctccagaagtacctttattgtacagggttgttttggctatcctgggtcttttgtttctccatataacgttaagaattgttctttcaaggtcagtgaagaattgtgttgggattttgatggggattgcattgaatctgtagattgcttttggcaagattgccatttttactatgttgatcctgcctatccaagagcatgggagatctccattttccattttctggtatcttctttaatttctttctttagagactcaaggtctttcacttttttggttagtgttactccaaggtattttatgttctttctccaccaaattgtcagggctacagatttttttgagttaatcttgtatcctgctactttgctgaaggtgtttatcagctgtaggagttccctggtagaattttttgggtcacttatgtagactatcatatcatctgcaaatagtgagagtttgacttcttcctttctgatttgtattccttttgttgtcttattgctctagctagaacttcaaggacaatattgaagaggtatggagagagtggacagacttgtcgtgttcctgattttagaggaattgcattgagtttctctccatttaattttatgttggctgttggcttgctgtatattgcttttattatgttgaggtatgttcctgttatccctattttctccagggcctatatcatgaagaggtgttggcgtttgtcaaaggctttttcagcatctaatgagacgatcatgtgattttttcctcagtctgtttatgtggtgggttacattgatggattttcgtatgttgaaccatccttgcatcccttggatgaagcctacttgatcggatggataatttctctgttgtgttcttggatttgatttgccaatattttattgagaatttttgcatcaatgttcatgagggatattggtctgtagttctcttttttagttttgtctctgtgtggcttgggcatcaaggttattgaagcgtcataaaaagagttcagcaatgacctttctgcttctatcctgtggaatactttgaggagaattggtattagctctttcttgaatttctattgagggatattaatgaccattgattgtttattcttattcattttggatttggtggtggtggtggaattatttgtgaatttccatcctatttttcttttggctattggaaaagtgggattatctagtccctatatttttgtgagtgtaattatcttcattgggttggagttttccttccagaactttctgtagggctggattggtggatatgcattgtttaaatctggttttgacatggaatatcttgttttctatattgattgaaagccttgctggttatagtagccatcaacggtctcttagtataggtagaatatatatccaggactttctggctttcagagtttccatggaaaagtcaggtacaattctaataggttttcctttatatgttacttgacctttttcctttgctgctcttaatatgttttccttgttctgtatgcttggggttttgattattatatgacaaggggactttcttttgtggtccactctatttggcgttctgtaggcttcttgtactttcattggcatgtctttttttaggttggtaaagttttcttctaagattttgttgaatatgttttctgcacctttcagttgggtttcttcaccttcttctgtaagtattattcttaggtttggtcttttcacagtgtcccatatttcctggatattttgtgttagggatttgatggatttaagattttctttggtcgatgagtctatttctccaagtgtatcttcaactcctgagattctctcttccatttcttgcattctttggttatgcttggcatctatagttcctggtcaggttttctatttctagcattccctcagattgtgttttgttttttgttttgtttttttttttttgtctctatttcatttttcaggtcttgaactgtctgaattgtttccttcatttgtttgattttttcccctggctttccttaagagatttgttgagttctagtattttttggattttttttcatttctttaagggattttctcatatcctctttgaggtcctctatcattttcatgaagatgtttttgaggtcattctctactgcttcatctgtgttgtgatgttcaggtcttgctggtccctagactccagtggtgtcatattggtttttctcttgttgaatgtgtttttatattgtcttcttctcattgcttcttctggtgggtgtagaaggaatctcttcccttcctggtagtttcgggaccaatgtttccttccagtaggtgcaaacagatccaatactcagatgtctctcctcttcctggtcctttggatggaggcaggactggtattgggctttgtcagtctctggatgaatgggatccaccactgtgagtagtcccccagcctcagctatccccgagcagggcaggcaaatgttgatttcttcctcaggtgtgtgcagtgtgctgaggagtggggggaaacatctacactcacataggtggctactttattaatataactgttttcccagtgtttccatcaacatgaatgtactatcccaggaatgttctaccagggactagaaagctgtaaacatttgaccctgtaggttcctcaaacatccaactatccatcaatagaaaacattaaaaaaagcttataaaccaagactgcttcatcctttgtctcaaaatctcaggtttcctgcatccacaaatctcactttgctaccaagtcctagccaatctcccacactaaagaagacttcagcatcccagagtgctattcattgtctcagctcagccttacctttctccctcaagagtctatgaagtgattgttctcactatccaaagaccactaagctgagttgtatttaacaacagatttctgggagccccatttgatgtcacccaccccagatagaaccagtgcagggctctaagatcctctctgtgggtgtctctacccccagaggcaagaaaaaggaaggtacagtagcgtcagttttctttagttatgcttggcaaaagctgagaaaattaggtaaatgtaccctttaaggatttttggttttggtttttgaaacagggtctctctgatatgtaggtagctctggctgtcctggaacttgctatatagacctggttggtcctgaacttacacagatctacctgcctctatctcctgagtgctgggattaaaggagtacaccaacatgccctgctatagaagtctttttattatatgattacattttttaattgcttttaagtttgacagacaaaatcagccctttgttagcaacacaggaaacagccaggtttccctattctacagttatatcaagaagtaaaggactagtgggagggtgagcagagaaaaagtctggcaggtttgaaagagaaagaaaattgccagttggatgtcataaagaaagtcagtacttagtggcctagtccccttactttctaaaagacagaaataaaatggagaaaaagaaaattgaagaaagcagtaatgacatgaaacaaacagatttgccagagtcagtaattttctaagggtacagtttcctttcacccaccctcccacccccctttcaggacttccttggatgctttctcattctatgtgtctcatgctttctcagtctatgtgtctgggatattgctgacctgagtcagggctggattggagtctaacaggtgctggccctgagcaagacatcaagcagacaggtaagtgcacagggttcccaggtccttcccagggtgggcaggagcttggcagcactggggcccctaaggctggaaaggatgggactgggtgcccttaagcactgagtcagaagtgtgattcactgggaggaccacgaaagtagtttccagtgactgcttcttgacccactgtgtcctggagggaacaatatggtgagttaggagaaggcatcgactgactgtccatcttgcttctgaaaagtcagatctgccctaggaaatcgaaacagagagagagaaatcgggcagctaagaagctttaagttatctttaagcttggtcaggaaatggtggaggagggagggtaagagaaaacaaactagaagtaagcagggcggtgcagagaaggatgtaaatgaagaagggtgagcaaaggagggggaggggcaaactggcaggggagatgtaggtggtgggggctggagagggttgggttgggggtggagaggaaagagttggaggggggagctggagaagggacttttaacaggctctgttactcagttactttaaagaagaagagagagcaagccctttattaaggtcagtggaatcttagcttctcttattaccacatagattggtttaggatagctgcaagcattgactgttttgttatagcatggttctgtctgaatactggaaaagatagaaagtgaggaaatagatatggagtattttcttaacctcttaactcttgctcaaaaactctagggaactgcaaaattcatgttgctttctgtgttaagggaagcccaccagagccaattgttaattatttattccagctggctaagactacattcaattatttgggacccaagtgtagtagcctcgagcacttagactaaggggcttttaaagacaggaaccacagcctgataccttgttcagcagctggaagaggaactttgcatgatcaggcaattaacagaagttaagttaactggggtatcttggccttgggtcctatgggattcatcatcaaagacatcaaattggagttaaacctaaaatacaagcaggaatacaggatggaggaacctctgctctgtcttgcacatcctgtcacatccactcactttctttttttctgagtgagtccatcaaatgagtcatcagcagataacagtaattctcaagttgtctgactggtggagtaatacatttgtggcctcgggaatcttataacactttctaactcttattttcttagaattcccggggttctaagagtccttggttaagggtattgatcacagcactagcaataatgttccctgagcaaactatagcacatagccattgtctgaagcctcacctacattttatttagtaattagttatttgggggtgggggttgttttgttttgttttgctttgaagacaggatttctctgtgtaacagctttggctgccctgggactcgctttgcaaaccacgctggcctcaaacttacagagatctgcctgcctctgcctcccaagtgctgggattaaaggtgtgtgtcaccaccacctcccaactttctctgtcttttctatcagaaaatgttctgttctatggctaatgtgggactattactacccttattaataacaaaattattaatttttatctcacaaaattgcaagagctgtgtgatgtattttcgggaaagtccttggaatatggcctagcccatcacaggtctcctccttgcattccatgaatgtatctacgtgaatgtccaaaagggtctgccttatgctgggtattgtccagatggcgaggtaatatagaaacatagatccttctgatggtatttagcactaataaagatttcaatgtttaattctaagtgctttcttttagagagagagagagagtaaaagaaagatacagaaaaaaaaaaccctctttggatagaaaaaaaaaaaaaagtccaccaaactaaagcagtaatttaagctatcatttcggattttttttttttttaccagttctcattttgatatttttttcttctttcttttgtcttcagggtactaaccagttctttgcctacttcttcctctacggatttacttagctttactatctccttcctaaaagaagaccaaggcttaacatcaaggtaagtagaaaacttgaattccctaactgcaagctgctgttttttattttgttttgttttgttttgtttgtttgtttttgtatttgaatgctgtctctgcttcagcttctaggcttgggcatgtcatgtctcttgtcagtggtatactttcctccaaacaaaatctaagaaaagcctgctttttatggcaattgtggggctaacaaattagaggtaatttctgttagaatcttaggatattgcttggcacataatgctctttgtctgttgttggggtgattatgcttggtcagtcagctagctgcttccgaacttggtatactggggcaaacaaggcaggagctgaagtgagatatggaaccaaaatgagtcatttcctctctacagattctgtcacttactgaatcattttgaaatcagtgtttcaggtaaaccatctttaagctaccatgagctgtgaggacaataggtcacaaagggacctctgtgatacaaggaaagacgtgaaaaccatgtcccagtcttctcaggtatgtctctataccctgctatgaaatagacttggccatatttggtcctagattgcatagttcttcctgccatgaatctgcttctttgtgtattgtgaaatcacccctatttacctgattttctatttcagttcatggaattgggaaagggttttgtaatccgagtttaaatcatattaaagtagggaaaaaacattgtaattttgcctaaaacaccaataatgatggttgtaaaaatatcaaatgcagcctgctaaggtaaacttagggaaaatgaaatcagtactattctcacagcatggaagtattatgagaatggatgagttattgaatcagaacaacctatgttcttatactacttgagtttataaagtgatttttttttgtatgttgattcttactgtgaccttgtcaggcagatgaggaagactgtggttatggagaggaatgagagaagggagttgctggagggagaactaaaggcttgggtcagttttctgatgtgaaatcagaactctttctactctcccgacttgtttataaaaatggtccttttctgtatctgtaaagctccttgaatatatcaagaaggttgggtattgacaggcaatcgaggatgcctcttcaaagcctctgacttgtttcttcttatccaagttccataaagctagaagacccaaatagctagaaaatccatgtcaaacctggatctgtctctgtcttgctctattagagagcaaaaatataataaccacacatactacttccccttcccttaaaagtttcaagccaagcaagacctgtatccccagcactctgtaagcaggaaggaaaatttcacattcctgcctaatcagaactgtataatgttccaaaaacaacaacagcagcaataactacaacatcacacactcacagggagaagtaactaaatttacccaaatgtctttgaatagttgaaaatcatttacagcactccacacagtgtgacaaggatactgctggtgacagcatttaaactgtagacatgctttaggggaatttcttgggatggccagaatacatttatgctatcttaaattctttttagtctctaaatcagagaatattaatgttatttgaaatggtaacaggtttaatctttgctatgctccatcattgttacccttgctgccagtgtggagcattgctagaagatgatccctgactgttggcttcattctcatgataacaacttaggttaaagaacctttcagacacaggaagcagatgctttcgctttgcactgtttagatcaatcctccttaatccccgccatcacattccctggtttttgggatatcatcctataagaatggaaattgtggacacagagtttacaaaagagaatgcatgggccagtgggagatgattgaaaactgagtattagcatgcatacactcagtccctttgctggttattatgtgacaataggaaagaaactcgccagaaaatgttcagtctgttaacatgtttattaaaaggtcagggaggccttttctttcccacctattgtaggtgcagttttccatctagacagttgatcagatctgtcctgccaactgctccccaataaccacacacttaagattaactataattgctcggtaatagatcaggcttatcactagctaatcttatatttgaagttaacccatatttcttatctacactatgttatgtggcagaacttttttttttttaatttagcacagcaagttcattttgtttctcttcacatcttctggagacctctagactcctcctcttcttcccattctctttttttctgcaagtctcacctaatctctacatgtccagctattagtcagtcagctttctttattaacctagttatagtgacatatgcacacagtgttaaggaatattccacatttctccctttctaactaaaaaggaagtttttaactctaacatagtaaaattatatgcaagaaaagcagttatcaagtaagaattacagttacaatatccagtccatttgtatttatcaaattagagaaaatactccatcagctgtcctctcctgaagagtctagagtttggtacctaatttactttctgccatgattagggagaactgtaatgtaactgtaactgtctagtcttcaactccatcaaagacctgagaagggtataacatgacctgagcaaacaggaagtgcagagcaagcaacttccaaaactatagagatgacagagacagatggctgcctggacagtcacccaaagttcttccgtaaaatacatattacatgttttatagtttttctaggtctatttcttgatgtatgtagccaggatttttagggggtcttctccgattaaacctgatccataacagcctaaaatgaatccatagcctctcatttcccgtggaaataaaaacacaacccctcccgcaaaacaacacaccttttgacttccattcttaagtcaaggtatttttagaatatctaggttgatttaatctagcagttttaataatccagtgtgttttagcaactgtcattccttcattaaccatcagaaaatctaaagataacccagactctctgtgtatttcctgtctttacatggcagtaattttattttactccctttaaaggactttactattcttacacaatttttttatgctatgactgtatataaatcctcttttctctctcaagcctatgtatatttttaaacataccataacacatttaaagtttttttttctttttttctgtcaggatctgtatttactgagcacctgtattgttctttgattgcatgagacgaatcctttttttcgggggtgggaggacaggagagtcgagacagggtttctctgtgtctttggaggctaaactggaactagctcttgtagatcaggctggtcttgaactcacagatatccacctgcctctgcctcctgaatgtgtgcaccaccacagccccaccgaatcttaaactgctatgttagtcgctagcatggctcagtttagctcatgctttgacacatggcattgacgactggctcctcttcccttggttccctgagaacttagcctcatagcagaggtaccagcgggagccacatttattgctccagctctgggaagtttttgagtccacagtgccacagaggagcactgcacctgatactcatagatccccatttaagcatttggtagcagggcctcttataagggctgcaccatgtttgccagtagcaatgagccaggaagctgcctcttaaaagagctgagcctcttttttctgctagcattatgtctcactgagaaaaaaaaaatggttattttatcaggatgtaattttgtgtgtttagaattttttaattaagctttgttaggtcttatgtgggaattccagccccatattggaaaatcatttgtaggtggacttttatttcccaccagtcagttcgcaaataaccacacaaagacttactttaaatattcagctgatagcttagtttgtcactaactagttctcataacttaaattaacccacatctcttgtctatggtcggccacgtggtagtacctttttttttttttaacacagcaggcttattttgttagtctccatgtctcctcttctctttcacactctcttttgtctgccagccccacctaaactcttcctgtctatcgactggccagtcagcttcttaattaaaccaatcacaatgacatagattcagacagtgcaaaggaatatcccacataggacttaggtattgatgtaatgtcagaaatggtaaattcttgcatgttagatgctggatgaatcaaggtatctattaccaaaattaactatttttatgagcaaataattaattaatttttttttactgctagcattgaatacctggtactagatcactacaatgtactgtttctgaatttgagatttgtaaactaaaaattataaagcctaggatggcaaggtgtctctaaaatcccagcactagaagacataagcaagacaaccatatgcttgaggccaacaggaactaactgaagagttctggggaggccttggttacataatgaaaccctatgacataaaaacaataacaaataaacaaatgaatacaattgccagggcaatataccactgtgcttgtcaaagatgatatttatattgtttaaaacaataagcaagacctaaaatactccatcaggaagttaatggatttaaaacatctggataacacttgtatcttcccccatattggttgggaaatgtaccatatgcaatgtaaggtgatggggaatgttcttctgtgtatatgtttgtcttattggttgatgaataaagcactgttggccaatagagaagcaaaataggtgggactaggaaaggaagaggactctgggaaatgtaggcacagtcagtcaccatgtaggataagagaggagtaaaaggtccagaccctttctccagtaagagaagaccacgtggaaatacttagattattagggatgggctaataatttagacagaactagccaataagaagccatatccagtggccaacagtttcaaaattaatatagcatctcagtgttcatttggggctgatgtggctctaggaccaggctggtgggaggtgtgctcgtgacagtgaggagattttctgactgatttttataagaatctgagcttgtattttggagcccaagttaaactctggttatctctactcaccggtctcttgaggttggtactgagtttcccataggaatcctgtgaattgtacactatctaccatttattttttaggtccccaaagaagagcagagtgattgcaacgttgataaaattaaggaagaatttagaaaaagagcaagtgacaaaaccaacacaaatgatgaatgggcattttcacctaagaaatgtcggcaagatcagaccactttcccaaatcagacaattagcatcaccttagatggaaatcataagaaaaatgaaaaaatgaaatacaaactcacacataggaagacagatagcttatatgtagcactcaacactctcaaggctgtgaagaaagagatagaatatcatcagggcaaagagatgctggtgtgtggcataaaaggaattgaagggtacataaaccctgccatgcccctttactgttttccagaaggctgccatgtgctcattacattctctcaaactgaaagtgagcagagagaagataagcaagtgtttggttctcaggagcagctgtgtgcagactgcatcaaattttacatccatgcccttgggaagaagaatgaaaggattctcaagtgtagagaacttcaccaagatgggaacaaactctgtgtctatggtttcaatggagagatcattaaggacactctgaggaaggatggcaggtttctttttgcagagagtgatcactggaagctcattagtgacctggacaccatcatagaaaacacccagccagtggatgagttagagggcaagctctttcaggtcgaggtggagaggagaacatgtcctcaggcagcagactccactgatttagagaagccgtcttactgggagttaaaagcacacattgtgaatgagtatccaaccttgaagagagaatgtgaaaaactcagagcatacatcaaggaagaaagtgaaaaacaaagtaagaaaacttcctcatttgaaatgcataaagcaaacttcaggaaattgacaaaaaactccaccccaactaaagtactcaaacttctttcacagttcagtgactcagttgggctcatagtttggaacaacaatggaaatgaaggctatgccacctgcttcgtttttacaggattgtatgtttttacttgtatgcatgtgataaatgacatggtggggaaaggcgtagagcaaagtaagtgggcagaaaaagttagtcaatgtgcaaaagtcacttttgattatgaagagttcctggcaagtgaagataactgcttttccattgaatcttggtttgagatatacgatgaaactcttgactacgctgtcttaaaactggaagaaaatggacaacatgaacctgcagggctatataatggaatagctcctgtgccatctagtggattgatttatattattggttatcctgatagaaaacagaagtttagtgatggctgtatcgtgatttctcaagatcagcacattcaggaaggagaggaagtgggtggcagtaatcccacacagtatatctatatgtacacccagagaagtttccaagaaacagtccgtgaacttgatgtggctacctgtgacaacattttttattgtgggtcttcaggatctcctgtattcgattctaaagggtcactgatagccatgcacactgctggcttcatttgtgagtatgaaagtggggtttccagtatcgtagagtttggctgtgctatagaatccatacttactcatattaagacaaagcatacaaagtggtatgatgaggaatgtgtaaatcagcaggatgtagaaatgaatagcctagatttttgaggactggggagaatttagtctgttttctttttcctttttaaagaagaagatttctattcattgaaagtctcacacatttatacaacatatattgatcatatcatctactcccatcttctttcaactcttgtagcaccccatctctatctcactttcatgttttttttagtattaataattgagcccaattagcactgcacatatgcatgtaattatgtggccacctactgggacatgaacaccttataagcagcctttttcccaaagaaacgtgacattccttgcatcagcggccatcatctgtcagtagctcctcagcaatggatagtgtcctgaaggccccacttcatccttgaaggaattttgattgatttgttcaggtagccatagcttcggtgagtagatgcctgcaacatccggtcacgtctataagtcagcattccaaggctctcctttccttcttctggttcttttgttcccccttgtccatgaaggtccctgaggttatcagggttgatacagatgacccagccacaactgaacactcacagttatttatactcaacacttgaatgtttttataaatcttctctaatcaatgttgagtatggcacaaatcgccccatggctgtagccaattttctgctttttcaaaatataagatgtccattaattctttaaaaaatgttaggcatgcatttaatgtattttgatcatatcggcctttctgttcctcttcctaacttctccccataactcctcccagatctaccccacccaacttaatattcttatttttgtttttaaagtaacatgagtccaatttgtgcttcccatatactgacatgtgttggggcatataccaaggcatggttgaactatcagagcccagaaccaacaactgcagaaagggtgggaggtcctaagtcccttcactacctgtttcaactgaaaatcagatggtaattcctactcctataattaaacctacttaaagaccttgtgcttttatttggagttcattagcttattccaaatgtcccattattttgttcccagattccacccacatttatatttaattatcatgttgcttttaggttcctgaaggctgtgacagccttctggagctgctggttttgatagccctgacaggaagagcactgggcaggcagtttttaggatgcccctctattgaagtttacctgatgattttttttttgtcgttattgttggtttttaagacaggatttcctctgtgtagctttggattctgtcctggaacttgctctgtagaccaggctggcctcaaactcacagagatctgtctgcccctctctcctgaattctgggataaaggtgtgtgcctccacctcctggctacctgatggttttctgatgactagactgaggtgtgagttccaaggaggccaatcacagtcaggtatcattgtctcactatcacatccaaggttcatttgtccacatgattcatgcctactattattgactcagttacctggctgaagtggtatttgcaaggtttctccattgtgaaggtataccacttctcctctttccacttcctgtatggcacccatgggaaggaagtcactatgcacagtccctgtttaaggagtgtggactatgtttctccttcctggagtaggtaatcctggagtatctacataatccctcaagatgactctgcaatgggaatttctttcttcctattcacttactcattcagttattcaggaatctcagaaaagtcatagaaactgtgctccactgccctatgcacacgtgtcccccccccccgccccagcttctcctcacttgtgtgcatacatgcctaccttgaggaatgcaccagacctaacaaaatgcacacctctttgctggaatttgaatccagtgctaagcatgtctgtagtactgaatccccctactggcccccaaaaattctgaatagtatattcttttcttttgtatttgtatctacctgactcatgggaggagtactctccattttaaaaatactacattagaataaagcaaagaaatgtgtaataacccaaatagataggtaggtagatggatagatctatgaatatttgcatacataaccatttgtatcaacaataattatctacagaattatcatggattccaccaaacgtgattcataaccacataggccatttctgactcttctcagtgcatctctattaattctcattacaactgtgggaaatatggatcttaccatagctcagtcatttagttaattgattaataagagtatagatagacaaatatagacattatacatacatacaagtatagatacatagataatagctacatagataattacatagatgcataggtgatagaaacataggtagaaatatacatgatgatatacataaacacataaataatatgtgtatagaaaaagacatacatataggcctatagataaatagctgatatagataaacaaatgcatagatataaatccagatacataaattcatagataaatattataaaaacatggagatagatatttgtagctacatggatatatgcctaaagatatagatgatatatacagagcaatacatggcaaaactgattgtttttctgtacttgaatgagagataacatttcatcagttaaataatgtgctcctgtgcaattccttttgcttcaatctgacatatgccattatcttctaaagttgagacagggcttccacccaccctatagataccatacacacattgggtaagattctttaaacatttggcctggttacacaaaaaataaaggtattccacattcatgctgtcctttgagttcctgaatgatttcataaatctgtttaaggttcacagtgtgacatttattggatttagcagatgttcaatgtcttacatctactggagtatctatggagtacttgggctgtcctgtcaagttcctgctctttcctttcctcttcctgaatgctggcaatcatctttcttctatggtcctcatagttctaccttctctagaatgtcacatttcaagactgccaataccccactgaagttgcttgcacacatagctcatctcaagtcattactgtatagtaatatatgatacatagatttgctgtaatttgtttatttactttctttttcaagagatttttgttgcttccagtgttcagtgactatgaataaaagtgctacaaacctctgtgttttggtttttgtacaacacacattttcaacactctgggccaaataccaagcaagcaaagagtataattggagtctatactaggacaatgtttagctttgtaaaaatctgccaaattctcccaaagtaattactattttgcatatttcagcaataacaaatgagagagggactatcccccaaccccaacatatggtatcatctggttctgtgctgtggtttatttgatttggatttgaggcacaccacagggaaggcgggaggtcttctggggattacaagatttgttaaagaagttgatagaaatgggttaataactaagacagccagccagtaagaagccctagtcgttggccaacagattaataattaatataacatccttgtgtgtttatttggggctgaggtggcagcaggacctggcgggaaagtaactccagcaacaggacaccttcatcttcagcatgataacgacatatttgggacctagagagttggctcagtagcactgatgctcttgggtacccaagtttgattcctagcacccacatgagattggtcagaaccacctgtatttccaggccctcagatctggtgcattctgctggcctcttggagaaccagatatacaaatggtgaaaagacagaaataatatgattctgtactggaaaaaattttcttcatgtgcctgttatcttaaaagagaatgaaatttaagtgtataagttttgtcagtgagtacatcaagtgtatgccaggtatcagtgatgaccagaagatggtgtcttaactccctgtgatgggaggtacagacagttacgagctgtcttgtgggtgtggggatcaaagccaggccctgtggatgagcagccagtgttctaagaactgagccttctatttagccccaccagcatgtcattaatagcagtaaggtatgactggcttatctaagttcatctttacctcagccctgctgatccagaagaaatataagattagtagcatcagaaacttagaattggtgcttaaattttctgatcctaaatctccacaaaatgagggtaaagtacaaacaatgatgaggagagaaactgacaataaaagtctttaaaagatggttgaccattcaacaacaacaacaacaaaaagttgaggctagtttatggaagctaggctatagtggacattgcaggaatcagaggctctttgagtgtgagagcaacaggagagggcaatttctgcaaaactgcaatgggggcatgtcagcccaactccctggagcagggagaaaagttgttgacaggtgtagatgtctgaggaggtgccatttcttgtcactatgacactattagaaatttatggagaaattgaaagccaccacattagatccaacttacaagtcagatattacaaatgcctatctggtttccttccatagtcttccaagaaacaaaatggtttctaccttccacatttcttcttttgtaaactttaatatttaatttattctttgagggtttcacacaaatacaatgtatttcgatcatatccgtttaactccttctggatctctcccaacttcatgtctccttttctttctttcccttccattcttcctcacccccttctctttgttttcacagccctttgagtccaaaattagcactaccaaaatgtacatggatttgaaactatctcctgtcccagtgcttctcaatgttcctaatgctgcaaccctttaatgcagttcttcatgttgtggtgagctgcaaccataatattatttcataactgtagttttgctactgtcatgaattgcaagcaaatatctgctgtgcaggatatcaggtatgtgaaatagttatttgaaccccaaaaaggtcttgacccacagcttgagaaccactgtgctagagcatggctgacctacctagggctacaccactgaagaaagccatacctcttgtgtctctctcttccccttttcctgagccctgatgatcatccttttattttattatctttgtagttttacctttttcagaatgtcagaccactggaggtatatggtgtgtaccccgtctcccagtagccatcaactgctaacagtttctcagctgtagcagggactcatgcccccccccccactgatgcttgcatgttttctggcttgaacttgtgcaaacaaccatagctgctgtgagttcatcaatgcaacagccatgtcatgtccagaagacgttgtttcacagcagtctgctctgacctctggcatttaatcccatctcctcctcttcctctaagctttgggggaagggcatattaaataaacgtcagatttgtggctgagcactccacaggcatttgttctctggataggcgacttgtaagtctctgcatgaactgctgcgcacagcccaaagaagcttctcttggggaatgaaactggttttatctacgggtatagaggaatatttggacgacagtttgatattccatcagtttagcaagatacaccataataggttctcctctaagacatatgagttcttcaaccacaggttcttggtcaaatttactacaataccaagcatgagtttcctcctgtgaaccaggaattagttggtaactctcaaaacatatataccaccattgcacacatgggcatatcttatcagaccaatcattattgcagctcacatggttcacccccaatgagattgttgctgactcacccctcccccccaagcctgcctgacacttcccagtactatgaaagctaacccccaaggataagcttccaggctgacactagtttgttttcttcatgtcctatgaacaaagtaccttgtgtctttagcagtagagtcttatcaaggttttcacataaccaagagcactagcaaacgtctgtattattttggggtctctgggaatcccttgaccaacttggaagtaggcattccacacctggcactcagcattttgacaaactatggcttctgggaaaagcattggtccccatgtagggtgactccacctaaacctccctccctccctctctctctctctctctctctctctctctctctctctctctctctctcctctcgtgtgtgatgtatgtctctatatatatgcatatatgccaatatatctgcatatatattccaatgagaaaagtatataatattaatgaagggataggtttaagtgggaaggggaatggggaggtagcaaagatagggggaaggaaaaatcacaccagggatgtttagaaacacctaggaaaaacatcaagctatcactggaatatacacacctgcatatatactggatacatacatacatatatgtatacatacatatacatttatatacatccatttctcctactgaatacatggcctacatattttacatctttgctttctacatagatattttaagtaaaatttaagggctttttaattttattttctatcattttttaatttgtgtattatttattcagatagaggctaagtctcaggctgacttcaagctcattgtatagctgagggcaaccttaaacttctctgggtatactacgtttgtgcacatggcgggcgtttatgtgctacactagtgaaggccagaagtctgatgccagtgtcttccttaaccactctttatttgcttgagccaggattcctctctgaacctggagactgctcgttttgctagactggctggccggaaggacacagggattttctgtcagccttcccagaagttgtattatatacaagctaggggatgcctagcttttgtatgtttgttcatttgttattttagatgggatttctgctgagtgggaattaggtcctcatgcttacacaacaagagtctacaaggtgagcttctccacagccctgaaacttcccatctttatgcttcctcctcagcaatgattgaacttctgatctttctgctgctacttcccaggtgctgggactagaggattgtgccatcatatgcagtttaggaggtgctgggatcaaatccagggctttgtgcatgctatgcaagcattctacaaactgagctatatatgcccaactgtttccaaaggcctgcttccctcccctcccctcccctaccttcccctccccttcccttatcttccttcttttcacaaaataacaaattttctaataacacttcatacatattactttttggttgattcttatccccgaacccgctccttccctctccctgcccctccctgtcatcctatgccttcagcatttctctcacttgtcatttctgccattattatttcctaaatatttactttcactgccctacccctttacacatttcatactgagtcctaagcttaattttgttttgctaaatttctctatccttatacaatttttaagataaccagaaaaaaagttgaatttcaaaaactgaaaacaatcccaacctgtataccccagtatctacaatttacaaaagaaattaacaaaaaaatcacaaaagctaaccaatgaagcatgtttataaggtaggcacttttttaaaatacatgttttggcttgaagtcctcaggtgtgtatttctcaggattagggcttccttaaggagaatggaaggatgtgtgatcaggaagcaatgttacaaccacaataaagcatcagatggcactctggagcaaggagcttaaggaagaaaagaggctggtcctcaaaccgtctctctctactgtcggtcccgctgcaccctacctgcacttggctggcatcgctgtattccctgagggactcctgtgcaaggggattgttgtaagcttctgatttcccagtgacccagttcggggaaagaattagaagtcagctggtttacctgaaatttgcagtagggaaggaaagcaatgggaaccttatgaatgggaccacaaggatggattcaagttgctgttgtgggatgttgtgctatgcgcttcccttctccatctcagaagacattcccctgtttaccattggcttcctgtggatgtgtagatcactacctttctgtgaaaactcagaaaagccacccaactacaaaggataacagaagaatccagctgtgcttagacctaaaggctgcaagtacattcacgggttatttatagcacagtagctccccctgcgggagataacctgcaaatacatccttaaaaagccaccctcctgtagaaccttttgaaactgactcctaggaagccttcttttccatgtgttctttcttggtatgaattaccgagactcaccaactagcaaaaggagcaaccaaaaggcccttggcagttaactgcaaatgatgtactcaagagctcagtcagggtagtgctgacattgattttgttttgttttttgaagacagctgactttctggagggaatttttttttctttactcagatgttgctaattaatgcaccagagagccccaaacttgcatacacctcaagaggtgagaggtgaacccaagaataatcataaattctataagtcagagacaggctaggatctcctaaccatagtgaaatataaactgtcaaagcttgcatatcccacaaagaagagggaagtatattccccactggggagaaggaggtgtgccctttgattggcttctttgtgtcttgaggcagcatgggggaggggtgcgctgctgtacccatttgcaggttcacacagactgtcagcactgagttaaacctacattataaaggagtttgtcagaagagccattggttgagactgcactgcagcctggctgctctgtaggtactaaaactatttgatgataagagtactatgaaatgaaaaaaaaaatcacagcacagattcctgggattttgaagcaaaactcttttttttctacatgggagaagcaaatcttctttacactgcacccatgagtatttagccttggtttgaatcaggcaactgcatatgcagagatacccatttgtgcaagatttatcaagtcataatgtcaggagtggccaaacacaatctcttagaagatggacaatgcaatctcagccctgaacaaaagcagcacaagagactccatggagttgtgtaaggaacatgggaggagatgcacaaagacacacatctactcgtgagaacctgcaagtgggttaggcgtcacaaaagagaggaattaaggttgcaagtcaaattaacaatgcaaatcagtcaatagttttgggtagctggtgtgtaccatataagcacagcagagcttccagaagggaatgcaaccatcaaatatcttatgttttagctagcaagacccacatcacatttctgacatatcactgggtagcaagagataaagacaggagagacccatttacctttgcttgtggtgacacactcctggccattccccagtgcagggatctgcaggctaccaggtcctgccctccctgtggaaggaaacacttctaccaggagacatggagagatgtcattgaactctacaagctatagcctccgcctgtcacttcacaagcttagtatccatggaccagcagattgtcaactcagctcatgaggagaatgtagagctctactgtgacactgggagggaaggaagggatgtggctgccattcaggttcttcctttcctagatgtgacagtgaattgactgagttgaccccaactggagaaaagcaaaacaagcagggttgcagatagccaagaaaggaagattttgatcagaacactatggaggagaccaatcctaggagaacttttagataaaggtgaggggactggaatggataacaacagtaatgcaactgagataaaaaataaagtcatcatatcagtgggtatagagaagcatttgacaaaattcaacataagttcacaggaactctcagcaaacgagaaatagatacgagctctccaactgaaaaaaaaatactaacaaaaagtccctgtagccattgtaattaatggtggaaaatctgaatatattcctgccaagatcagacacaggcagtggtatctattctcaccactcctattcagtatcacactacacatcctagccaatcaaataaaacaagaaaaaaatcaattaatagtgtgcacactaagaaggaagaaataaagctatcattacacatccattattgtctaggtgattttttgttgttgttgttgttttggtttggtttggtttttaagacagggtttcctctgtgtagctttggattctgtcctggatctcactctgtagaccaggctggcttcgaactcacaacgatccgcctgcctctgcctcccaagtgctgggattaaaggtgtgcgccaccaatgccctgctgtctaagtgatatttatgaacatcaaggcttgaacaaaaaatgtttaaaaccctctggtaagaaaagaaatgctgtcttagttcctttctgttgtaataagaaaatattataagcagattatttataaataacagatatttgtcacttacagctgtggaggctgggacatataagattttacagatttggtctctagtgaaaccttactctcagctccaagatggttcctttggatgcatccctaaataatagaacgtatgaagaaaagggaactagttcttgaaagccttttagaggatcctcttctcactcatggcagctctacctcttaatggtattactgtgggtcttacatttgaacatatgagttctaggtgacccttacattcaactcctagccatgattagagcagctgaaggatgaacagatagtaagcaaaagttgtttccttatatattgacagtgaacaactggaatttcatatttaaaccagcatatttcttcagtaaatctcttcaaaattgccttggtagaatttccatagggattttgccaaatctattgatccagttttaaaaaaaaaaaactagtaagttaacaatattgagttttcccatgatgcatatttgccaattcacttggttattcactgatgtgatttgatggctttcctcacacaaacctcatgaggtatttttaggtttatgtatcagttgccttctgccagtgaggtgtatggctagtgctatttccctcagtaacaacggatgacaccacacacggattatatacccggggagctcactcaagctgtagtatcagagtttttgctggagactgactggccatgtagacatggctgactttattctccagacactacagagtcagatctgatattgtgtggcccaaacttaccccacagatactagataaaagagccttccactcaaagaaaattatgaggggcaaaagaccattatctggttaaaaacaaatctcacctagaagacagtaatcttaaacatggacacacaaaacagcaaggtgacaggaaatgtgaagcaaaacctgttagaactaagaggagaaaaataaaagtctatttatgactgaaaatatcatctctttctcagaaatgtgtagggcaattacgcagaagaccagcctggaatagggacagaagaactaagcacatgccataagccaacacaatacaacaaacatttctaggaccaacaatagcactttgggttttttttttttttgtgtgtgtgtgtgtgtgtgagagagagagagagagagagagagagagagagagagagagagagcaacaattgtacatggacaaagaacacattttgaatcacaaaacacacctcaataaatttgaaaaaagttgaattgttggtgagggagctgaccctcccctttaccagctgcagcactcaggaaagcaggctatggacctcacctggaccagcacagtagagctgaccctgatggtataggtgtaagtgagttgaccctgagggtgtgtgagcaggggaaccagcttagtcccttgctcattgctgcaaagggtgaactagtctgggcaacgctggagaactcactcttgtggtgaggaccggggagagctggcaggctgaccaacccttcaaatacccaggatcagaaccaaggttgagttggcccacccaacatccaccccatctatgatcggctggagcatgagaaggggaacttcctgcagatccaaagctgcaaggtctccatgacacaggacaactggatacccaagaggagtcccagtgagggcccaatattgaaggtgttgcagaaaccatgggcctggaaccagaacaatgacctgttgcaatgaacacttgcaagtaaagacagatggatacacgggattgctaagtgacccagtgggccacactacagtgcccatgatgagtttatgactaaatttttcttttctcttttaaattttattttattttggggttgtggtttgcaagggcagagggacagggagatgaatggcatcaagaggcatgatgaagaataaataaaaacaaagttaacaaagaaaaagaagacattattcgatccggaaaaacaatgcttttttttattattttgttgtggcatggctgggaattgtctgaagctaagtatgtgccctacaactgaggtacatctcaacagcctatggaaacacttacctagcattgtattaagttaaagttcaatgggtactaatcatcaaccaaaaccgtagtggtccttgaaacaaataaagcttgtatataatacaaaaaaaaaagttgaattgtattactttgctcgatgactacaatgaaatcaagttagaaatgagaaacagggagacagcaggtcaatctcctcagtgctgggatacccgtgaaacacatgtagataatgcgtgtgtcaaagagtaagtctcgagggaaatgcactgcactgagtgaaagcaagtatgaacacatcaaaatttgtgaggatacctaaagcagtgttggggggcaaactgaatacataaatgcttttatttggatactaaagtctcaacctcaagtcagagcttctacctcaaggatgtgggaacagtaactggggagaagacacaatgacgttactatgcaagcatgaggacctgagtttgggtccccagcatccacatcaaagtcaggcatggtgacacatgtcataaccccacactgaggtggatgtggagcagtggcagcggcagcagtggtggtgctgagacaggtggatctttgaagatcattgacagcaccctagccaaatagctgggctatagggccagtgaggaaatgtgtgtccagatataaggggaaaaatgattaaggaagatgtttgaaatcagcctgtggcctccacattcacacacacacacacacacacacacacacacacacacacacacttatatccacacacaggaacaaaaacatgcacacacacacagagcttagaaaaggggaataacaaaatggacatacgaagaatgaactgctgctactgctgctgctgctgctgattaataataataataataaattggaaatatattaagagacatgaatttccaattccaattccatagaagactatatatatatatatatatatatatatatatatatatatgaagggctgtgaacaactccacttatatacatttcacaaccattccacaaccattccacaaccattcctcaactttgaagaaatgaactaagtccttcaaacctacaagccaagacaactccttggattaccttataacaactaagaaaatttaatttgtaactaaaatgtttctgaaaagaaatatccacttctaagcctggcattggtggcgcacgcctttaatcccagcacttgggagacagaagcaggcagatagatctctgtgagttcgaagtcagccccatctacaaagcgagttccaggacagcctccaaagcaatacagagaaaccctgtctcaaaaaaccaaaaaagaaagagagaaggaaaagaaagaaatatccacatctggatattttagagaagaattcatattgctctcccacaaattagaagatcatagacttcccaacttatgttttgaagctcatattacctggatcccaaaacacatacaaagacaatacaaagaagaaaaaagaaatgaaataaaaaatccagacaagtgtctttcataaatacatgcccccccaactccttagtaaaatattaaacagaactcagtaatatttttaaatcacacactgagactaaatagattttattctagagaagcaaatctacacttcattatttggaaagacatcatatcaaagaaaaacacatgtcataaactcagtacctgttcatggtctttaaaccctcagactagaggaaacaacctccagtttgatataaagaatctaaaagaaacacccatagctactataattcttaatgatgaaacaccagttgctgcctctgtaaaattaagaacaaggcaaaaatgcccattatcagctctgtattcagcacagtgctgaaaatctaagtaatactttccactttgggaaagactccataaagaatgtggaaggcaagttacagtttgataagtattttcaagccacctatctgagttttttttttaatttggaatattttctaaagctctaggactttaacagtaaaaggcaaacaaaaaaagagcctaaatcatgaacagacatttcatcagagaaaacatacagatagcaaatagtcacacagggagcttttaaacatcccaacttttaaacacacatggggtggggttgcagaagttacacacctatcacaaaggctaaaacaaaacacactggtgctaaatgatacttgtgagcatgtagagacatggtaaatatgttgtcaagaggaaatacaaaatggaaaactgacagtgttataatataggtgaacagtataactacctttttatcttgtgaattataatcctgaatatttaccacacagaaatggatcttaatgtgcactcaaaatcctgtatgagaatgttcatagaagttttattcagaatagcccaaactagaaataattcacaatttcttgcatgagtaaacagaaaaataacctgacatagtggcaccattgagcagtattcagcaataaaaaggcacatgactgataagcataactcaaatctttagagaactgagcttagtgtgaaaaccaaacccctcaaagattaggcactcaagtttctatttacatagcgttctttcaaaacaaaacaaaacacaaaaccagaggttagagagatgactcagaggctaacagtagttgctgccctttcagaggacctgagttcagtttccatcacctgtgtggctcacaactgtccataactccagcttccggggatcagttgtctccctagacttttgagcacctgcattcacacacacacacacacacacacacacacacacacacacacacacacacactacacataagtaagataaacaaaataaaatatttttcaaatcacaaaatcatacacatggagagtgtgctggtgacagtcaccgacagggtgacagtgggaaaagaggtgggcgtgattggaacagtgcaaaatggaagaagtacagcatgagggatctgtgccttaatgtgtgcaaaacataaattgtacaatgtataacacaaggatggaccattaaaaatcatggagcaacttctgtattttaattgtgtcgatttcagtaataatgcatattaccgtttgtagccatctgatatctataatttgatagtaaggagaaaggaaatacatggaatctttcttttcaaataagggtgagttacaatgattttaagacaaaatttaaataacaagtgggttcttcagcttctgtccggccttttacttggggtctcacttagctggaacctagcttctttgcggtgaggatgccatcagcattggttaggtccttgggcagaaagctctgcatgagcaatcagatggcagcaagcctagcagactccagccccagccacctgatcaccagctgcctggagctagctaagtctgtgtgagccagactaagcgtcctcagaagcctctgtcgatctgcagatttggtgcaaaggaaacacttgctgctgtttttagccactaatttcagagtggtttattacacagtgatgtatgatggggagaatgtgacgtttgctatgaatactccatggaaaaagaaaagtatatcttcaatgagacttgtgggagcaatgacagcatttttaaaagcatcaccaaattgaacaattcaaacctggtttcatttcattaaatctctgggaggtttcattataaccaccataactacaaattacatattgtgtatgtcatttgcttaaggagttttatatcacttaaggccgtaagacacaatttcagtgaatatatatatatatatatatatatatatatatatatatatatgtccaagtgggatgttgcttgaattttgaggggtttgtggcccagattagctgaagttgggatatctttgaattattttaagatattgacacatacataattattattaacttataattagaaatgattatttgagtgctggagagatgactcagtgattaagagcactgactgctcttccagaggaccgaggttcaactcccactacccacatggcagctcacaactgtctgtaattccagtgccaggggacccaaaacccatggcaaaacactaatccagaagacgacaacaacagcagagaaattgttatttgaaatttggtttttatggactataagttaatgtggcttattaaaatagatgctttttgcaagtatagatgtgtcagttgcttgccttgttcctatgataaaatatctggaagacaggaggaagtactactgcttggttgatagtacaagggcacagttcatagtgtcatggaaataactgaggtcatgtgacaagtagggaaaaagagtgagggcccggcacttagttctcattcttccttttatcctgcatcacagctcacggaatggagctgcctacagctacccaggccttcccaccttaatttaagtgattctagataaatccttagtggcatgctgggaagcttttctcctgagtgactcgagatcctgtcaaagtaacaatcagtgtttactatcacaactaattcctgatggaaactcatctgtatctctactccctctagccaattacccaggctgcaagcgctctcctgtgttgtcatttaaattctgctataataccctgccatgttagcatggcaggcaaaagaagacttaatgcaaaattaggatgggtccattttttgtttcctgtttatctttcaagcagtatttcttaataccctcccaccccccccacccccgccttgattatgcttgccttatctgggaattcctagtttatctgctcaggagcagttttctgtctcctcaaacataaaaagagcatacgaaactctgaaaaagctattctaaaaaaagattcataatcttattacccatataaaatcactccaaattctatcttcactttgtccagatgaattctttgtatgtgtggtttcactgacagagaaaagaaatgtgttccctgacaaggttaatatgtaattctcttaaaaatcctaacttatttttctttttgagagctggactggctacgtggcctgaaagtctcattttcttgcctcagcctctcaattgttgccgaagttacgagtgtgaggtaccatgcccagcaataaggtaccctccaggcttcaatcccctttagtcagaatgcactgaagattcatgatcaaaataaacaagtctagcttatgtttactctgctgtctcatggttttattcacagagataccgcaggagagccttctaactctaataatagagaaacggcccgacaagaacttctctactctctacatagcgtaaacacacgcattctttggtactggtggtcactagtgtgtgccctttgacctgcacaagagatttgcgaccaccagggggcggggaagctctagagctcttggtgcgagcggccagggggcgtggcttctgcatccttgacagacagctaaggaaggatgcaggcgaggatgaggtaatagcaggcagaacgaagagggcgtggggttgttcgtgcgcgcgtgtgtgtgtgtgtgtgtgtgtgcttgggtgtgtgcgagtgtgagtgtgtccgtgcgtgcgcaagccggaggaaaatgcgagcctcggagctcgggccgcggacccggccggcgctgcgctgaaagcagacagacagacagacagacagacagaaagttccattttttaagagagtgcgaagttaaggcccggccgtggccgctggggtcgggatggcgcgcgtgctctcggcaccaggggactagagaagcgtcctcgggcgcgagctcgccctggcgcactgccggggaggggcgactccttctggaagccactgagcagagccgcagggagggggagctgtgtcgccgcggtcgccgcgctcagtacggagagagagggcggagggcgtgaccgtgcggtgcgatccacgcggacgcccgcggagcccgaggcgcaactggtgcgaggcggctgcagcgtcgctcgggcgggctgcgcgcccccgggtggctttgcaaggcgggacggcgagtgcgcggggccgggcctttgcatgaagcggctggacccttcggagcagcagcggcagcagcggcggagcccggcggcgcgcgatcggaggcgggcggccccggggtccgcgtcccggtgcctgcgcggctgcggactcccccatgggcagcagctgaggctgcccgcggcggcggcggcggcggggcgcggggcagggggcgcggtccaggcccggaggcggcggcgccggaggaagcgcaggaggcccggcccgggaggcgggcagtgctgcgccacagccccgggctcgccatgctcctggcctcggccgtggtggtgtgggaatggctgaacgagcacggccgctggcgtccctacagcccggccgtgagccaccacatcgaagcggtggtgcgcgcgggtccccgcgccgggggcagcgtggtactgggccaggtggacagccggctcgcgccctacatcatcgacctgcagtccatgaaccagttccgtcaagacacgggtgagcagcccacatcccttgtgtctcccgggtgctaccgccctcgtggttgtgggttgtgggcagtttgtcttactggggtcagcgatcggtgttgagggcaggtgcctccttccttaggtcccctcagggtcccatgatcacctccaaataaatgtccttcctagtatttgaaagtgtcttgattatgcaaacccagctacagtctagcagcaggagaccccttaaaaccccctttcagtccctagtgactctttgtgcaggaactctagggttttgcagcccccaagcgatgcttagcaagcaagacattgctggtgccccttgtctgctcacaccttggctgatcctgctttgtcccaagcacacttggggctaccacatgtcccccttttaatctttctgtctctggctctcttcaatggatccagctttcccaatgtctcctcctgggtgtgagacttggggaggcagagggatcccctggctctaattgcagtctagtgtgtgaaagtgctgtaacgttactgggtagagagagaatggagccagggcttccacatcatcctggctgtggtggcatccacagatgcctctgcttgtagactccaatcactgaagcaacaggccagagcagatggagagaggaggggggaggactgggctctggaatgcctggcagggaagctgctccctttgtccatggaggagggagggagtaggtggaaggctaaaaagaagctgtccccaggttttttcttaaaacagcacacaagggccactctggcctcccaaagcactgaactcttgtctttacataaaaaccaagtgccagcaagaccaccacagctctcccagctgtgcagcctttagccaggaatggaactacagaggttagagttgggggccattggagggagaaggaaatcacagttgctgtcttctctggatccgatgtggtcaagcttaactgatgacctgggataagtttctgtccccagagagtaatctttttaattgggggtcatttctggaattctggctggcctttcccaagggtgtaactgcagagcctggagaagcaggtgtggtggggtgggacaagaggatatgaggaggagggccctgtagctcagggacagctgctggacaggtcctctgaacttcctaggaaaaccctcgcatcctgtgtgctaattggaattgtcatgggaaagaagtatagttcctccctcttgtaatctgtagccataactccgaacagcctctttgccaagaactctgtgaccctggccaatgaaggaaaactttctggggaagaaaaaaattccagaagttttagcatctggcgggcttgagccttgatggagaaagcggggaggaggagctgagagcaagagagagtaaagaggaatgcaggaagatggggaaagaggattgaatgaaggaagaaggtgctagaagctgatatggctttgggtagaggatgtggaagtaaggcgtggagtggggcctcagatggagggcaagcgtgggtgtgtgtgtgtgtgcgtgtgtgtgcgtgcgtgtgtgtgtgcgcgcgcgtgtgtgtgtgtgtgtnnnnnnnnnnnnnnnnnnnnnnnnnnnnnnnnnnnnnnnnnnnnnnnnnnnnnnnnnnnnnnnnnnnnnnnnnnnnnnnnnnnnnnnnnnnnnnnnnnnnnnnnnnnnnnnnnnnnnnnnnnnnnnnnnnnnnnnnnnnnnnnnnnnnnnnnnnnnnnnnnnnnnnnnnnnnnnnnnnnnnnnnnnnnnnnnnnnnnnnnnnnnnnnnnnnnnnnnnnnnnnnnnnnnnnnnnnnnnnnnnnnnnnnnnnnnnnnnnnnnnnnnnnnnnnnnnnnnnnnnnnnnnnnnnnnnnnnnnnnnnnnnnnnnnnnnnnnnnnnnnnnnnnnnnnnnnnnnnnnnnnnnnnnnnnnnnnnnnnnnnnnnnnnnnnnnnnnnnnnnnnnnnnnnnnnnnnnnnnnnnnnnnnnnnnnnnnnnnnnnnnnnnnnnnnnnnnnnnnnnnnnnnnnnnnnnnnnnnnnnnnnnnnnnnnnnnnnnnnnnnnnnnnnnnnnnnnnnnnnnnnnnnnnnnnnnnnnnnnnnnnnnnnnnnnnnnnnnnnnnnnnnnnnnnnnnnnnnnnnnnnnnnnnnnnnnnnnnnnnnnnnnnnnnnnnnnnnnnnnnnnnnnnnnnnnnnnnnnnnnnnnnnnnnnnngtgtgcgtgcgtgcgtgcgtgcgtgtgtgtgtgtgtgtgtgtgtgtgtgtgtgtgtgtaggaagcagttgagccatggaagtgggatcagcagaccacctgacagggagttccaggcctgctcaaaataaaacagcaagtttagctcttctatttcagaccaagtctgtgcagcatatggagagacattctagtaatgggcaagccctatcctctgccccactgttaggaagtcagaggtttcatctgtatttgggactatttaagatggacataaaactagaagcagccgtaacctagatgatattcttgccaaaagtgaagttctagagaacctggactgaatgactatctccttcccagggtctggctgctggtggctcctctcaggggggtaacctatagcctagtggttatagcaggtcactcagcacttcaactaatcctgttttatgtctgtgtctgagaactagccatgatcctcggcaagactctgtcactgagctgttccttctgcctctgcacctctttttaaaatatgatctaggtatttacttcaggctggcctcaaagtggccagtcacatgccttagcctcccaagtgatgggattgactacatatgtgcaccgcctcctcctgcctacatccttttaaagatgccctgtgtgtctcacatccacacggctttggcttcatcccctctcccctgtatcaagatcacttcctaggtacctctctcctccatgccaagtgctagcctgggatgctgaaggcataaataaggctgatttcctagaaaggctggccctgtcacggagcttgtcagtgcagattagaattccttcatgtcaactctgacccccttctgctcccttcttcgtccacacaagaactctgtcctctcagtatagatcattgatgagactatgacatagtaggaactttaggccaccagctcccaggcaacctcagccaagccctggcaatgtttaattaaattactcactgtccccaagctacactgtaaagctgggaacaacaacaacaacaaaaaatccctataaagacagactagctggaagttccctgcctagaggcaattcctctctctttggttgtcttgttttataggcatttgacatgagagctttctcttttcagagttgtatgcctggatacctcgtgagcttgatctctcagagctcttgactgcatccagactgtctccggggagatggctgggaggttgcagactcccatctgcctgcttctgtttgccctgggtttcccttccccagactttggcagataggagctgatttgcattctaggctacttttctctagccatttgggctggagaatattgaagaaggtaagaaggaggggggttccggaccagtcagtaagccttggtggagtcctctccatccaaagtcctctagtgtcatttcccttttcttttgtagtgaggccttcccgtaactattcaggccttttcctttgtgggctgaagagaagctttcagagtccctttcttccagcataggcatctgcggatgcattgcctgacccccctgcaccagcagccatgctaatggaagtagattcatgcaaggcagaattatttccagctcaaagtttttagaactagcctgtctctttttatctttagtgtagtgagaaggccccattggagtgagtgggataacaagatttgacaaaatctcccctattgcttaatacctagtatgggcccaggactggaggaggtagactttacaattaccacgtggacactacagtatagaggagatatgtctgtgatatgccaagcaagttgcacaggtgtcttgtttaatctttacaaggattatatgaagactaattattcccattttatagaaaaaggaccaacttgaaggagcttaaattgctcaagagttcaagttatttgtcaatgacagagctgagtccagtgaagtgtcccatgtatgcctcctgcatgtgtgagcactgtggcctagctatatgtgcagtggcaggtgtggggggcatcttggtaatagaacatccaagaatttgcccgaatggaacattctacactgagggtgaggtgaagtctacactgataagagaagctgagtgtttgacagcgtagatggtaaaaagcacaggtgtgggtcacatgtcagggacatcagtccatgcctggagcagtctcctagttcccaagagacaaaacatcttcaatgccattagatgctggtgtgggttgctgggagaaagcattttttccttctccttcctctggtttatgaacatcctctatgcctactgaattgggaaccttctctctgggacatcacaccataggataaaatgggactgcttcatactgtctaatccatggtcctgattctagaaaagcccagggctaggatatcccaaataaagcagactccaggaataaaatcccaccctctctcttttcccaaatttttggctctgaggttgtatatttttgatgactacctgtcaggctgaactaaatccagcaactttctctggaaaaaaaaaactagctggtctttacattcttctgtttgttaccattttgcagtatccttgaggtcagcctcaggattctttgactccttctcttactcagagcccaagtggctaatgtgtccaggaatacaaaatgtgtaagcccattggttgaaattttaatgaatacaaagagaagtgtattcctagaccaaggctcttgggccttgggtcattgctgggcccgtccgggttgtgaacaagcagccttgaaacatcatttccagagcatgtggctgtccatgctcaggtccttcccagtcctcttcatggggtatccccacctctccttttgctttctctaacacctgcccacccactctgaactgactgggagagcagttttgggcttgtcacttatactaaaactccccattagttcttccttacccccaaacaaagcacattacagcttgatgttctagactttccatgccctgactctagtttggtcctctgtgccttagattttcccagtagttctgagtttttctccaccccacctgttcacatggttgtcccttgaagtgatgccctttctttccatttgactattgaaattctctttatctttcaaaccttatgtcattcgttatctatttcttctaatgttctgcaaaccatcatcacttcagttactaatcacattttatcgagccccttaggctccataaatgtcaagcctgtgcaacaaaaccagggcaaacagttttatgcttactgttatcagattgacaatctaggaagggaggcaggtctggatccaactagccacacagataaatgtgcaaactgcatgtagagattagtgctgttaaaaattgggaacaggatttgacttggtcacaaaaatttccatatggtgaaatgagttcagtttaacctgaaagagccagcaaagaacttgctgagtgatcaggagagaggacctagcatggtgaagagtcccagagtcagagaacagcaatggggaagactggaagccagtgtgaaagaaatgcatgcagagtgtgtgggggaaggagctatagatgttggcgaggcaggaaattttggtcttggctgaagacaaaaatctgggaagatttaagccgagaagaggtccagtcatttttccctagtgacttgtgtttccttggtgtctttttggctcattttgcatcataaacaacgactcacacatttgccttttaactccttttgagtctgcactctgcttaagggatgcttgagttttgcattctccatagcaactaatgggatgctgagcaatatgccatcaatgagtaaatatgatagtagccagagtgttcagtcaatcatggcacagtttatggtgcttttataactgccagacgttgcagtaggaagtagaatacaaagagccacacagctatatccatacccccactcagcacctataaggagggtaagcttagacatctgaaaacaatcagtccagttctgcacctaaaacttcctgaggggtggggctgggactagaacatttcaagaagtgggtgaacaccggcataagaactgaaagagaatttcagtaggtgaaaatgacaagaggctctaagtggaaaggttgtggtacagttggggagtcacgatggaatacatgagaattaagggattctgtacttgacagaaatagtgggaaatgcaaaggatagaaagagataaagtagggtgaatcaagtcactacgtggtctagagagttcagataccatattcaaacttttccaggattgataacttcattgtctaagaatcaatcgatcaaacaaaaatgcttttcaagtgcatttgtaagcaccaatcaagtgcattgcccctattccctagagggaagttccaaaggtgtcattaaactctctgaacttaattttcttatctgtaaaagctgttttataggattgccatggaagttatatagaatgggttcctgtgagtgaccaagagtaaagactgtgcatgtaggtcagggttgcttttttattttctcttccccccatttctcccctctacacatacacacacacacacacacacacacacacacacacacacacacacacatacagtgtcctctaaaccgcactttcctataacatctcaagggtgaactacactaatgatcaccatttcattgagcacttgctgtgtgacaggttcctatttgtagtgctgtatttcatttaatcttcaaatccacctgtttcagctatgcacagacctaagggatgaggagagaagacttcctcccacagcaggaaggaatagaacctcctccatggaccctgtgctttgttccccagaaagctgacctgcttgctgaggaaggaaatgaaggctagcccgggaactccaccccccctccatcctgataccctagggcccccaacagaggtcctggcactgaatggagaattgttctgcttctcccttgtgcctctgaatgttgatgttttgggttattaaggggcttggagatgggatggggagtaggttatgaccctggcaaaggcctgaataaccattgttcctttctttccctcttgaatgggattctgtccgagtcatggtgtctccctttgagttgggggaaggggtgggtcagaggccaggaaaggggagccttttcccaccacttccacagatagaacttaagctggcagatgcagggacccccagtatctcagagccctcttcagccttgagccttgatgttgatgccatgaaatgagtcctggttggagacagaatttgggattggggtgggtagaggaaaaagaggcagaaattctgtagtccagttctcttgtgggccctctgggtcatccgtgctgtcctgttaccttgttatcaccctggcccttccaaccccacagggagactactaaaatgaagaggatgctatctttagaagggttgagtttcttggaagaaacccttacataattgtgaaatgaatgttattattactgataaaagacttaattctgggaattaggtcagagttctctcaagatgatgacccatctcccaataatacattttcatcttaatgtctttacatttatttgttttggaagggtaggagataggttgagccatggcatgtgtgtggagatcagtggacaacttgtgggagttggttttcccttctaccatgtgagttcctggcactggatccagggtttagaatcaagtccccttacccactgagccatctcagcatccggttatcccctctttctaaagcctgtgaaagaacctcggtcagcttcattgccataacccctggccttttagatgggagcaaagttgtcctcctatcttctggacttccatggttctttgttcttttcctccatagccccaagggcagggctattcagaagaacaaagatggcatatgagcactttcctgcatgagggcacttctctcccaagtgagagttaccggagaaatcctggcatatgtgaattcatatgcagtaactacataatcgcctctagtgtttgttagtttgttttctataaaaactcccaggaaagagttatcctttctctgaacaagaattgactgaggtagtctgtattagctggaaaatgaagagatttatctacaaactaatgcacctgaatcctgagtttggaggtgcgttctgctgcttggcaacgcttcctgtgccctccatgtggcttcatctgcttctactctggactgcttgtagaatcccgaatgtgtcgcattcaaaactgagtcttattcagagccttcctagctagcacagggcccgccatacagtaggactgctgttaatgtttacctgtgaatctagtacaaatcagtggtattctcctaactctgacccctccgctgtcttactttgacaggcacgctacggccagtccgccgaaactactacgacccatcctcagcccctgggaagggtgtggtgtgggagtgggagaatgacaatggttcctggacgccctatgatatggaagtgggtatcaccatccagcacgcctatgagaagcagcacccctggattgacctcacttccatcggcttcagctacatcattgacttcaacaccatgggtcagatcaacaggcagacccagcgccaacgccgtgtccgccgccggctagacctcatctaccccatggtcaccggcgctatgcctaaggctcagtcctggccagtcagtcctggaacaaccacctccccccctgcaccaccctgttcctgtccacagtgtgttttggtgatgagcgtcaaggcagctgtggtccatgggcgcactgggccccttcagcctccaggaacacgcaagaacatggctccctctggagtgggcaagctgcctccaccacctggccctggggcaaaaccaccagactctgcaggcaccatccggggcccagggaagactgccccatcgcaggtgatccgcagacaagtctctaatacaccatctggggcaactgtgggctcccccaccagcccacaaggaagcaacaggaagactggaagggtggcactggccactttgaatcggtccagcctgcagcgactggccattgcccagtcccgggtgctgattgcctcggggtaggtgttcccatggctgccacagagcaattacccacctcagagatggcgtgggactcatctctgggtcagacagcaagggaggctggctaaaacaggcaaacctagtcttctcaggctgagccgccctggcagatagatggaagctagcagagtgtggacaaggaggggtgccacattagaggtctggacacaactgaggctttgtctcttggttgccatgtggtctgaggcaggacccacacatgaagctgtaacttcatcgttagtaaacactgcagacatacccatgttacagtcccagtgaggggtacagatgactatgctaggaagtcttagcattagttgaacttccactgtgctctggtttaatggtttttataatctttgtaatgactctgcaaacattatcccatttcacagatgaaggaaatcagatatgttataggagtctggccttgcagtagcccttccctaccagacatttctgtcagtacaggcatacagtaggtgccaagcaaggattgcttcatccatgccctatctcagcattctcagacatgctggtgctgttggaggtaccgttagtgtttcttatgttcttgatacccctcatccaccaaatgggagtgcccaggccccgcagtgcctgcaacagcctttgtctgacatgctggcttcttgtcagcccatcacactcaattgccctgtgcctcaggtagtttagatggctttagagctggaatgggtccctagactgaaaacccaggctgccccaaggcagtgccatagatgctcagctgggtctccaaacatcttagcatagggaagacttagcacagggcagggaatgaaaggagacatgcagctgaagcggggagcactaggctggaacagcctctattcctgcctctcacttaagcccttgggtctttgcaagggtcggtgtccttgtgtgtcagacgatcccaagtttgtataccctgctcatgggattattgtgcagacctccatggatagagttgattccttgacaagtcccagacgtgcttgtccatactgtcccacttttttcactgatttacgttagggatgggcactttgctaagatctgtctctccttggagggtcacccagctcctatggtgcagagaagttggaagacaagattttgtccactgactggtcaatgtttctgctatagcctcagttacatgaagacagcttacagtgctagttagaggcatggggtgctcatgacttcctccatggtgacgtaggggacagaaggaaagaggtgcatggatcctgctgctcctctatcttggattgcagcagagtgccagatgctctagcagagttccgggtgattgttggcacacaggaggaggctctgtgtgcacatgtgagccccctgattgctgcacttgaacccaagttccttactgtgccacttggagtaagttttgcctcctctgtcttcagtgttcttagctgtcgagtgactttataatggtacttcagttctagggtgtcacaagggttaaatgaagccttcagtttagagactgcccagaggccagtggtcgttagctgcagatgatgatgatgtatctaaaggttatacacttgtgttgttactgaactgaagtcaaagctgaactgatccaatttacacctcatttctgtcccgcttgataaatgccccagtaaccccatgccatcatggagacagatgccccttgaactgctgtgagtctgaggaagtcagcaggcttcatttctttcctttattcctctaccaagctggacagaggagtgggtctggcaacgcactgcactttcaaagggctacagaaatgagctgcttttgctctgtcttcctgacagggagtgccctcccacctctgtctgtcttccagccctctcttctcacctttctccacctcccacgcccctctgccatctccttttccagcttttcttggccactaatgagcgtgtgttatcccctttgtctggcattgccatcagccttctgtcattacacagccagtccccatcctctctgcccatgacctcttcaagcaacactttcccacaggggggtgggggtacggggaggaagatcagggaggcaggcaatgtgggatgaaagtcttggcagggaacaaaagatgccgtgaattattcagacacaagcaggaggttcttaaaaggggtgtggaggcctgtgcagggcagcaatcacccctctccccccagagtccaggtttctgtacctccagctaggcatggttgttggttgccttagagacaaagccattgtccttcatgaggcttcctgggttggtgaataatttagaaaacactagctttctcaccatggggtctgcagggatacgcccacccccatccccattcaggctgccctgccattgctgtgttagctcctctctttcctcagttttattttatcaatggaaataaaaacgtggaccctcctataaccggtaacagcccaagaggatgggggaagggctgtcttctgattggccagcacacggctaagtccaagggctttggctgagttgcctggaggatgtagaagcaggcctgttattggactgctgtttcctagaaggaggggctcagactcaaatagctgaggccctacgggcaaaggacaggttttctggggtttttattttaacctggaactgtgggggaagggtaggcgggtgttgcctgctcacaatcctccatcctgctagacttttagctctgccctttacacctgataccgtgtgctcaagaatgcgagaaaactggattattaaagcagcaagtggcagaaatcaaatccttcaacaattggaaagtaaaagtgtaaacagttgcccaaatttgcacaaggctcccctgtttaccaactacttgacctagatcctagggcctcacagggtccccaagggagcagacatttatcaggtcttgtttacagctggagtaaaggcaggcagatgtgatcgcagaataccaaggagctggccagcactgccacaggcaaagcatgatgagtacagatgcagccgccactttctgtttctccctccacgttaggtgtttggtaaaacacagcactgagctccactgctgccacagactagggaccagattgtccccttcctgacacacaggggcaggttggtcctaccagttgattccagttttcctgggtgttcagaggttccacaagaagatgtcccctgtctctctttagacccccacactccacaattcttgggctgctctgaggattgaagtatttcctcgttgaccaggtagtgcgtggaaacctgccagtccagtttgtgggaacaaaggtggcctttgtcactcagatcacagtattttatcagctaaggtgagcgccgtggaaacggtgaaagggggctgccctgcctatgctgttccccggtgggcagccaggaaacataccacagtaggccggcccttcaagtcttttcaggtggaggctggaaggtgaatctgccctggaggggggtccagggcttctctgagtcaccttcctctcaaatagtttgatgggaaattgctaaggggacacattctaaccccagactactgaggctcaagcagttggcctactatttgcatgttatttacagtgtttggccatttactgaacctggaatcaagtctgttcctttttttcttggtctagtgactcttatttaaagacatcttttccctctccacatctggtcttgctttattcagggagcagttcagaaaaaaaaaaaagtagcatcttggtttggccagatatataaacataatgtccttttatgagctccaccgcttctgtcttcatgaagaggcaccagaggagcggcttcatcctgggcctgtgtgggacagagagacctggctgttgggcctctcttctctcctaatggtggctttgctcgttacagcatgggccggtggagagcttggcatcatgagcggcacagtggaagccagatactgtgtgttggactcttagttgcaatcttggtctagctgtcctaacctctgtgtacccaaccctgttacctatgtagtgggattgacagtaacacctcgtacacagattattgggaggactgagtgggcttatctgtggtgggcacttacaattgcccccagccagatctgagtcccgtgactcatagctcatagaggaagagctgtacccccaacgttaggcataactgtcccaaagtgggttcaagaagttcttttcaaatagacaaataaataaatattgatttcttccaattgacttcccggcacagccttaccccagctggattctcaggctgcctggctcccagaggcatggatcaccagccccactggcttctccaagccagctgtggaagcctgggtggcagaagcctggaatggcacaagtcccatctctatgtgtcctgtattttctctgttggtgctttcgctgtgggcggcctagcctttcccaggcagctgtgtgggctcctctccagagctggggaagacagggaggggaggagattctgcttgtgtttataagtttgtgggacaagaagaagtgacagctgttcaagcagtggtttccaaatcctgaaccagagattgcaacatctccactctttgaagagcttggggcgcgggggtggggggggcgatgcagattcctgtggtgcgtgaatttggtggtgatggtggggttattataactccgattttgactatagatctgtgttttagccaacactaaggggagtgtaggtggaaatggccagtgacttggaagaatatattaggtagaagaaacatttataaaggagttgaggcaggagctagaacagagagtggaaaagtgttgagaagaggttgtccgaaggctaatgaatgagaatggaggtattggcaggcaatgcagggccgggaaccctggctttgactagacccattctgcactctcaggttctgagtggaggatgttgtgatcggagctcagttttgaacctcttacctcccactgttgtgttaagaacctactcactttggtaggtttaatcactggtttattttgttgtttgtcaaagccatattacatctgctctttccttccacagggtccccactgtgcctgtaaaaaacttgaatgggtccagccctgtcaaccctgccttggcaggtaagaactaactaaactgggctggactggcttcggctgaaaaatcagtcatggaatagctaatgaatacttatttataaagagagaatttggatgctaactgaagaaaatgagatctgaggacttacttgaacaagaagacttggggtgctgctaaaagctcagcctgtccagggtcttgggaggtagctcttacaatgaagtgtgtgacaggaagtatgagggcaatagttccatcccagagtccctcttaaacaaacaaacaaacaagaagaaaacaatttgggaatagtcatgtgtgcatataatccccctgcttgagaggcagagatgggcagattcctggagtttgctggccaccagtttcctggcgaggtccaggccaatgataccttgactcagaaaacaaggtgaccatcctgtctaaggatcaaggaacatcatggaatgtaagatgcagaagacagggagaagggctgtaaaattctaccttctaagtctaatgcagacagtcagtcaggatctcacattagctgtggctgcctacactgggcctacataagaatgggcgtgtcattgaccagcaatgcactggggagagctcagagggccctgcatgtccctgttgaactagtgcttttctgatagattcagggagagggaggattgttgccttcagttatataccccaccaagctctaatagtcacacacaagtccctggtcaaaattagtggttcgcaaaatagacatgaacgtgggacacagacattttgataaagggacaggggtttaagagggtgagggttagaacaaaagcccatttaatttttttttttttttaaacgaggtgcttggcttctgaggaacaacttacaaagcagttttctggcctttatccagccacacacccaagcatgcaactgcatatgtagagaatgcatgaattataaaaactgtctgctggagaggaggggagtgggtaaacgggagggagggtgtgggaatcttgggagcacattcttcagcccttcctcacccctgccctgccccttccaggaatcaccgggatcctcatgagtgcagcgggattgcctgtgtgcctcactcggccaccaaagttggtcctccacccaccccctgtcagcaagagtgaaataaagtccatcccaggggtctctaacacaagccgcaagaccaccaaaaaacaggccaagaaaggtacagggctcttctgaataggtacctggagtggaagactgagcttgcagcccccgctctgcctgcaccaaggtcaagccatgccttagcccctgtgttgtcacttccttgtctgctaagcagtgggttgggtgtggctcaggaagtgctacctggacacacataaacatgcaaagcaacagtagcagaaacataaagactgtaagtgttgtgcgaagacagcaaggtagatgagacactgaatcaagaagtcctaacttggccactagctagttaggtgcaacttctgttctcttctctttgtaatgcccacgaccagcaggtatatcctggaatgtgcccatgacagctgggaaacaaccactgtcttaggtctctctggagcctctggacctttggccccatgaaccctgcttcataaatcactgtgtaccagtccgtaatccagctactgagggaaagggcaccttccctgactccagcagctctgggttggctctgtggctgatggtcctgtgggctgctcttggatgtgaaattacctgcttcttcttcttccaagccttcatcttacaaacttcacaagaacttttattcagaatggacgtgtggaagcagcacttagcccgggcctggcaatagggaataggctcttaattaatagaaggagaattctttcaagagaagcaggaggaagggccagcatctcagcttttggctgttgtctgctaaacttccttaaacccttgtcctactttccctgtctatttcaatttccctgctttagtgaactcacatgccttgttcttcagccaatgggtcggggcaggggtttacactcctgccctcttcctggcactatgaatagcacatactgtctccttatctggcaaagcgcacttgggctgtgcagccatcagctaattagtcgtcacagcacccactgcagtaggtgctatcaattgtccttattttatgggtgagaaaacaacttggaggaatcaggggaatagcccaaggttccacggcttcttgtaaaccagtgggaacctatcctctgccttcaggttagcttatttcccaaggatccagcgcctgaagatccttaactcctgtggctcttagtatgcttcccggagcctaaccctctccccacggctggactgcatctcctggcaggaacagtactagtggaagccaggaaggattgtcctgaaactgggggtcacaacttcctgctttcccataaaaataatttgacggtgacaccatgttacaaaactgagatagggcttaacaagtcgttgaaggaatgtaacccgactgactcgtgtttgtggagcagtgcaaagtgttttcatttctctcttctcaagggatcatgtgggcaaggctaggctctttggttatcaggaagagaaactctgtttatatcagtgaaaatgctgatttgctgaaataggcagacatgtcagagagtgggctggaagaggtcaaggcagataggaacatcatccttcttcaagccactctgatctggggcatcatctattctcatccatgctccttaaaccattgcaaaaataatttgacccccttttctcctcccttctcctctcctccctccctccctttgccccctacccccgtgtgtgtgtgtgtgtgtgtgtgtgtgtgtgtgtgtgtgtttgcaagcgtgtatgtaagtctatacatggagaccaaaggtcagcctcagtatcattctttagatgccatttaccttgctttttgaggcagggtttcttatttgcatgggggcttaccagttatgctagagtgctgtcagcaaactcgcagagatcttggctttttcacctggtttctggagatcaaacttaggttctcattcttgtgaggcaagcactttactgactcagctgcctcacaaccctttttctctttgaactggcctctcactcttctctctgaagcacataggatggcaaggctagttgatcctgtctcctttgccttgtgacatagtgactctcctgtccccataggtaaaaccccagaggaagtgctaaagaaatatctgcagaaggtccggcaccccccagaagaggtgagttcaggggacctaggtcagggttcactttttccatcaccaagttcatgtcctctgtccccatgttgcacagggtgtggcaggtgctgctttctaagtccgggctggcacagagcagatttagctgatgccttcacttcaaggttcaaggtttcaagctgcagtcaccgtttaacttgccctatttacagaattctaaatgattctaagctgctctccatgccggtctgagcttaagcaaaacagtgtgccaagccatgtgaattccctctagaatggatttgatatggaccagtgattctcagccggaaggattacccctgagggaacatgtggccttgtgtgggcattctctgcgttgtggtgattgacgagcgagtgtgctgctagcatttagtgggtagaaaccagaggaacttctgaaaaccctgtaaggcctgaaacagtatccacagcaaagcatcgctctaccacaatgtcaaatgttagcattgggaaataggccttagatttgtttaggtgcaagccccctctaatacatttgcaatacaatacctttacaggcatggcgcataagcagagcttgtcaccgtatctcttgacaagcaactggagacaccaagcaagggcagtgttgcatcaagattataattagtcaatgagtccaagtttaacatgtacgggaattatttgaagaaatttctctgctgtgtgaagcaagacacatttagactatatttagaatccctcccccaacacagcacccctgatttgtggcctttatagaagaggggtgaaccactcgtctgatgcctgccatcatacaagaaccatgatgctctggcttccctggctgggtgaaagttgatgcctctcttattcttcatctaccaggactgtaccatctgtatggagcgtctcacagcgccctctggctacaagggcccacagcctacagtcaagcctgacgtggtgggaaagctgtccaggtgtggccacatctaccacgtctactgcctggtggccatgtacaacaatgggaacaaggttagtgtctgtgggtttgggggcagtcagccatgattagttcctaagtgtccttgttctcccacaaaatggtctggaacatgtaaccggttcttcgggtatatttgctactttacttactgctgtgacaaactactggcagaagcaatttaaggaagtaagggtttgttttggctcacagtttaagacagcctgtcgtggtgaggaagtcatggtggtggtaggagctggaagtagctggtccatgtccctttgtagttaggaggcagagagtgatggatgcaggtgctcagcgcactttctccttcttatttagttcaggacttcaggccatagaatggagctgttcacatttaggttgctacaacccagtctagaaactcctcacagccatggctagaggtatgtttccccggtaaatctgaatcccatcaggttgaccatcgggattaacctatacctcagggcagcaggaatgaacattttcactgtttgcatttttgctgttttcaggattaattagccccatattgcaaagtctgtcttcattttccctttgggttaagcttcccttcatctctaatttgggtatgtatgatggtctgacagaggtgagctttgttcatgaaggttctcagggaaatggtcccccactgggtaaaggaggccttcatcacagtgctgctcccatagtgagaatttcttcattcatgacactgcaagtgggctctcaatagtttctattcttcatgccagtggtttaagttaaaattcatcttctctggacaatgtcaaaacacctttgattgtccctgcaaaggcattgtcagagttcttggtaatccccaccacagtatcaactgtcagaagatgagacagggcttctctccattaactgacttagggttatagttggtttcagaaatctgggtgttttccctaagtgacgattttcccttttcaggatctgagctttttgaagtcattgacttgcattcttgtctgtgtctggaactacccgtcacccctgttccccgtgagttttcgtacaactcaaatctgagatttccatgatgtctctcaacttcttactcacccaagaacatgtctggattttagggacttctccttctgtcctatgtagtggggaagagcaggggaggtatgacaggaagcacacctgtgtggaaatcatggcttatgagctgaatgactctaaacttcttcaagatttcactttccatttcaaaagtagagctaaaacagtagctgctgctcctcctccctgtgtgtgtgtgtgtgtgtgtgtgtgtgtgtgttcttattgtgtatgttcatgaggaggctggaggacaacttctggtgttagctctagaacactacttacgtctttcgagacaaggatgtctcactgctcatgatttaggctagggtggctggccaacaagtgccacggatcctcctgtctccacctctccagcaccagggttataagtgcatgccaccactcctgacattctagagatccgactcagtgcttgtaaacaagctgcttaccttctgtgccatccctccagaccaatggctgctgacagatgttatggctgttattactcaaaatggcatctcctttttattattgctctcatttcctcctttcatctttgcattggggttgaattgctaaccttgacatcttcattggtgtcccagaggctaaggcttccggatgcccttcatcattggtgaaaggttccatgttctctttcatagcccagggctgaaatcttttattagaacctcaccttttgagaggttatttggaatttttaggctgtcttagcacatttattcccctttggatgactctttaagacttcccagtaactccatgtatatgtctgcagggctccaaacgtgtttctcaagccactatcctttgttctccctttcagtgttgctttgaatcatttttattctctcaagcccattgaagaaaagcaagggagagaatggactcattcgccccaggccttgaagcaaattaaggctagtggagaaagcaggaccctggtttcagacagcggtgactatgaatatgagctgttacttaaagcgagccaagcttggatagaaacatgcctaagaggctctgagaaggtctcgtctccttccaaaagactccaggtgtctgtctgccagggccttggtcccagctgagcagtaccacattctgcttgctgcccatgtgagcttccttccctactcccctcccttttctgtgaagctcggaattcccttcgctgtctgggacctcttgccagttatcatcagccctaccaggtgacacttcactagatcctgctgcgaagtcacaaccgtttacattactgtctccgtgacacatgttcaagtcagtgtttatagctatgacaaaatacatgggcaaacaacagaaaaggaaggaatggttttgttcttgtttttagttacttagtttgttttggcccatcatttcagggatatagtctgtggcctctgtgtgtgtccccctcccttcgttgcctctttttcttcctgcccttcaaacctcctggctgccatcaaatcactctaccagtagcttcatctgctgatgaggtttgagtcctcattatccagtcactctacagaggctcatcagtgagcagccagccctcaaatccgtgagccttgagggacagacctgtgatgacctgctatgtggtgtagggcagaaggtagggcaatttaggggcttcactggaattccagcctcactggtgacaagcacttcactattgaagtccctccgatactttttctcttaaagggaatctcagttccttcccagctaaagccaatttataactgtttttaagaaccttctctccccgcccccgcctcccccctcccagtaagggtttctgtgtgtaacagtcctggctgtcctagaatttgatctgtggacctggttaccctggaactcatagagatccacctgcctctgcctcccgagtgctgggattaaaggcgtgcaccaccactgcccattttccttaaagccaattttgttcctttccaagcatttgtctctccacagatatcataagcacactagtagcatttaaatatgacatattcgaaacactttatgtatctcacttaactttcattagcccagtgaaagaggatgattatatttcttgttctaaaaggaaattgagacagattcatttgtccaaggctacaaggcaaagctgaggctcaaatctaggcagcattaccttaaagctcacactctgaacttctgcacttctccggctcccagttgtgactcagtaggcctgttgtggggtccagatgtctttaactttagaaagtttcctgggtgcatctgggactcagcagttgagcagttgttgctcttgagcagttactgtgtgttccacccatgttaaattgcaattccctgtgtagggcttcctgccctagttagcacttcctttcaaggacagaggtgtctcatctaagcatctccgctacatgtgtcattttcttccagttattttagagaaagcctatgtggcttaagtaactagagagggtttcaggtctgttatccgctggctgagttttgtctcttgagactggtctctggtgctttaaggggtttcggggaaggtcatgaacaaagtagtttcctaatctggctatcctggaatttgtttccttaggatgggagtttacagtgtccaacatgtaagaccatttatggtgtcaagacaggcacccagcctccaggaaagatggaataccacctcatcccccactccttgcctggccatccagattgcaaaaccatccggattatctacagtatcccacctggcattcaggtgagcccacccttggatggtccacttattatttcaactttgaatgtttggcagtaaagtattacactagcaaaagcctccttcccttcctgtccccatcttgtgtctcactcccctggttctcccccttctctaccattgtccttgtttttctgtatccttccagcgttctttgtgtggatactcggtgtagactgcctcctcccctcctattttgcacaaagagctacatttgagcacattgtttcaccctctgcctctttcagctaacaatatgcaccttgtgtttgtatagcatgtcctctttctttctgtttctgtgtaataatccagtgtatatataatctaatctagcacctccattagctgtctgtttccattgtttgcaatcttttgctacagcagataatgttatcactaaataacccagcacacctgtgaccatatctgaaggacaatttcctggaagcagaatgtcttggccaaacagttatttattagtgttttttaaaaaattgatgtttatactttttgtctttggtggcatttctttcctccctggtatttgaaaaacagtcagccctcaggaccaatgtgactagtaatcccatgagtcagtgcagttcagcccttccctcacacagtggggccttaggtgttctggggagcagctcggactcatcccttagcaaacatcggttagctcagcctctctcgctcctcctgtgtcttcctgcttgtcctttgtctggcaaatctttgcgtgtgggttatgcccaggtgtgtgttaagtactggtaaaacagagtttgaattggtgcagtctttgatcccggaagtccccactggggccaggaggatgataaacaaatgaatgacaaagtacatccacataatggaaagttacgaggaaataaaaaagtgtgatagttcataaaacatgcgtcttccctggggcacttggtaaccaggcagagcaagataaaaaaaaatacctttcactcctagtctggagagcagaaacggatatgcaccagtgatgaaagtgacacggacaaagggaagtgcagagcttcaaagtcttatgaccccaggtctcacttcctgtcttaaaggtgcctgcttcctcctagatttacttttttttttttttcatctgtactgctgggaatctgctaggcagagggccaagggtgggagatcctatctgtctgtacatctcagggcccactctcagggggctcaggaccttgcttactgctgtctgattggctgagatatcaggttgaggaggaagtgtttatgggtggtttatctgaaaggtgggaggagactctctggttcatgacactctctagtgaagccgtgaaagacataaagaaatgcagagtacagatttagctggaggaggtaacagttctagagaaaaattgcatgcttatggacatttgtcgaatttattcaattgggaggttgggagctcagacttgcaaaaaacggcaaggaagaactgttgagggtgtaggggtcacagaaggccttgaatgccaggaccaggcatgaagacttagactatggggagcccctggagattgcttatctgattaggtttataaaacatcatgtaattgaattgagctttaagaagctgttgtgacttaagaacaggtgagtgggaataggaccactgcagcagttcaggctcctgaataagggaagggccagggaaggaaggaagatacaattggctgctgctcaggagagactcgtagaatggtcctgaggcagctgttggtgtggtaaggaagaataaaatgtgcgagtgggctggccagatggctcactggtaagggtgcttgctgccatcatgacagctgagagccagtcctgacaagccaagttcaatccccgaaacccagggagaaaaggaaagaactgactcctgcaaggtgtcctgtggcacacaggcacacaggcacacaggcgcgcgcgcgcgcgcgcacacacacacacacacacacacacacaccttaaaaagaaaatgaaaagagtccaccaggggtcaaagtagagctaacagtcaaggggcatccattgagaaggccatatttttaagcctccagatttaaggaacagagagagagtctctgtagaatggccagtacagggctctagcacctccagcaacaccctggcttgtgaaaggaaatgcatctataaacagtcagatgctctgcagacttgctaccgtaagtcagtagcaagatgttcggtgctgtgtcccttgaagctccagggatgatgcaggcttgggcttcggtgagctgagttcttcaggctccactttcactgcagaaagtgcgtccctttgggagaagccgtgggccaggctgaggcagagtcgtgactgctctacctggcgtcaggcccagaatgcacagccttactgggtcagtgccagacaggctgagttgggcacacacccagcagccccaggcatcagagaagcagttggagctatggtcaggcttggttcctcagtgatgaggcctggcttagagaagtgtggtcctgggaatgttgtgcgtttgtctggatgtgaagatttagtctgaatgtgaagttataactgtcagattcttttactccataagaatgtcactcttcttttagctcagagtgacatttgtatattttttaaacatttttctatgctcaaaatatactttgtagatatatagaattatcaaagaaaaataagaatatactttagaaatttttaatatttttactctttggcagttttatacatgtgtacactgggttagagcattttcaatccctgttgccctcatactcctccctcttgcccagcaatcccactcctttcttttgacccaatgaatttaatttcattcattcattcaattcattcattcatttgctcactcattacatagctggcatgtatttattgatctttgggaaagcatgtcaaacagctgcatagaattgtcaatattctatgacttggatttatacagagttttaaataaggttctgcttccaaggggtcaggaatgttcagaaatgatatacaagcattctcatgggtggaaacctgttgtgtcaaacttcataaacttctcaaaggggccaatgaatgtgttggggcctgtgataactctgtcaatgtgacacaattgagaatcgccctggaagagagaatcccatgaggggttgtatgtgttagtttggtttataggcctgactgtgggggaatttctttattacattaattgaggcgagtgccatcattccctaggaaaggggctctgtaatgtgtaagagtggagaaaatgagtctgacatgcatgtattaaatcgttgctctatgctcttgactgtgaatataatgctgattgcattgggcaaggtctcctggtacctcaggtcatggcagcaaatagacaagcagatgcattcagaagaggaggacaaaaagaggagagcagccttgctttgtaagcaacatgctttcacagcaactaacccggtcccttgagggcaagatgagaactctctgaagagagacattcatcccttctgacaatctcatcgcctcttccacaccccagctgcccacaaggctgcattggaggccaaattccagcaagagttttggaggaacaaaccatatgcagtaccatagcgtctgggttctgactcagttctccttggatgtctttcctacccagtgtcctgagacggcttgggtaataaaatattgggtgatgatagcttaagtgccacaagactctctgtcctgaacattgccgtctgtgttgttgagtaaggaagcaaaacccatgaagacaaaggagaaaatccacaagaatcatgcagaaaactctgactgcatgtagcttggagaactttattattctaagtaattgttttgaaagtccaatgcacatgcctcagaaaacctgggattaggttatttctggcaaagccggttagcttctgtgggctgtggttttcatcattcacaaaacagtgcataagtagtgttggtactgatgatgataaaatttgctgtaccctccctgagcattggtaacaccccataaggtgagtattccaaatcactcttaccaaagaggggaattccatagattccagctgggagctagcagctgcaggccaaactcaggtcacatgatgtgtaacaacttagacttttttttttttttttttttttggcttgtcctctgtgtgaactctgtggctcttgttattgtcccactaagcctgtattagtttctcatcagaaatgtttttgcaagatgcctttgttttctttctgctttcagggaccagaacacccaaatcccgggaaaagcttcagcgcccgtggcttcccacgacattgctaccttccagacagtgagaaagggagaaaggtaagagcaggtgttctgtagtaggggtagggattgattttgtttctgcaaagcacaaattgtgtatatgcagtaataaggtcacatcggaatcaaccatagataagaattagtatcattaggatgttgctttggtgtgtgtgtgtgtgtgtgtgtgtgtgttacatgttatctatgggattgcaggcactcatgtaccacagtgtacatacggaagtttgggtcaacttccaggtgtcatttctcacctttgttttgaggcagggcctctcttgtttcttgctgctgtatggcctactccaaactagctggcctgaaagcttccgtctctgccacccatctccccacaggagtgtcaggattacagatgtgcaccactgcatccacctttcagcgtgggttttggggatctgaactcaggtcatcagacttgcatagctagtgctttcgcccactaagccatcctaccagcctgattagaatacttttacaggaggttgggagtggaatggctttacccctctcctcagggtattattgacaataatccacctcttataggatctttatctagagccctgctgtttaaagctggtcctggagaaacactagtgataactcctaagagcttaacagaaactccgaactggaacccatatcatcttctcggtatcctggctgttctattctgaacacactcaaaagcatgagctaggtgttctggtatcttaattggtggctaattattttatttgttttctggattcttagtaattcatcatcaagacttctaaatattctagttggaatgacaggattttcattctgatgccaagaggactaagaacattagtctaggggacatgttagggaaatgcaagaggcaggcttttagtcagcttcctttctagatctgagaagcctactcaacaaatgtctgtctttctgcattttaagtgttaatggttatgttgccatggtgtgtctaagttcagtcatttgtgagcctatctgagttccagcaaactgccacagaccatagacagagtggcttatgaacagcaggtatttactttctacagtattggggtctaggaggtccaagatcaaggtgctggcagattctgaatctggcaagggttctcttcctgctcatagacaaagcctcttctctctgtgtcctctccagggagaaaggacaagaattgtcttcccagtccctttttataagaatctcatttactgacattcattttcatgacctaatgaaccccagaaagttccatattctaatacccactttagaggcagtgataggaggtcacatggatttaggggatgcatgagcatttacctgcacacttcccatgtgtcttcctgctttggaagccagactggagagtttccaagaaacataaacggaaaccatagagtggtcctacagggcatctgacaggattccaattgctaaggaaaactctataccacagggatacaggaaagcagagtgtcttcatgatgaacaaaattaacagtttgagattcccagaaagtagccaggaaaatattcttactcaaggttttgtatatcccacccttaagtctggcttattgctattttaacattcttatttgaaaatatatctctataaaagaaacatctctatttgtgtaacctttacaccaaatgtaaattgtgctggaattcttgattttcagctggccggaagtttcaaccagactccattgagaaggggcttccatttcctccctgtaatctcataataccctatctttccataggacttcaatgtcaagtggtgtgggtgtgtgctgtccttccaagggaggaaaggatagtttgtaacaagggcaacataagaaagatgcactagtgccctgctctcaaattgagaatgagaattaatgagaaagagaatttgtctccaccaagaaacaaatttctgtgcctcagcccaagatcttctggtaaaggtccccactgtaaagtctgttgttaagactacagttgtgggatgggaatgtggttcaattggtacaacacttgcctagaatgtgggaaatcctggcttccatcctctgcacttctaaccaaacaccttacacttgcctgtattctcagcactgaatccattaagtttgaggctaggctgggataccagagactatctccaacaagcacaagactacagagctactctccttctagaccttcctcttcatgcagcaacagaccccaaatccttgggacccaggctatgcacattcaccatcttgaagtcttgctttcagtgactaaatacactgagctcattattcctctctgcattgccttccaagccacttaatcctctgctaatcctacaggagactgcttcatcttttgtcctgacaccacgtcaggaaaaacaatttctggcatcaagcacctttgtttaagagtaattaaaatttagagtaatacttagatgtttcaatgaccttcccctttcctccttacaaagcacactgtcttggcttaacataaaaagtctccaccttacgatatagatgtaaaccatctcttctcaccaattcccttagcaataccattattagtaagtggccttcatatccgcaggtccatgaccctaaccttgttgggtataataacaacaaggtctttgaagctgtctcatacttttcagttctgccacttactaatgatggttcaatgagaaccctgtctcaaaaaagaaaatgggcagagagcactccagtgaagcacgcagcttcgtccaatagcctccaaatgcacacacatatagtggtgtgtacccagacacgcgcatatgctatgctacgcatgcatacaacctttggggtgggtgattccattgctgcttgataagtaaacaaattaaagctcagaaagatgtttaaagtagtcggaagttacacagttattcaatgacagagttgaggttcacgctatagtacccaggctccaattttagatctctttctcttcttctgagttgcttagagcatcatgatgaggaaagggttgggggcctcgggatgaatccaccatctgaagaccagtactcaaccactgcctgtggtctctcaacttcgttgccccaggttctgaagctgcttctggtggcctgggatcgtcgtctcatctttgccattggaacctccagcaccacgggcgagtctgatactgtcatctggaatgaggtgcaccacaagacagaatttggctccaatctcactggccatggttacccggatgccaattacctggataatgtgctggctgaactagctgcccagggtatctctgaagacagcactgcccaggaaaaggactgaggtgggagggtactgggcaggaagtcaagagagtcatggtggaagttgatgccatgcctcctgactccctcatttcccttctggttctgtctccacccctcaaccctctcagtcacagagggaactagattaaagtgatgtcattcatcaattttttccaacacaaacaggatgtgggatgagggccatcctcccaccccatttgtcccatggagttttcagtgctgggtaggtaagaacctgcacctgtgccctcccttaagtaggggatatggtcagcacacttaagttatgggcaatgttgagacactccataccctggccttgtgaatctgagatcccttgccttagctggctgcttgctgcttgctgcttccactctgctttgggagcagagtttctgctttttttcccctctactggagtcagggagctctcactgtgcgagactggggagagaggggtagactgctgtgacatcagaaatgggatgccttggtatagagtaaggaagcagttcgtgctcagagggtcagagtcaaaagcctctgagagcatgtgcagctctcattatagtccctggcttctctgggccctcccttcctcctgtcattgacctgtccttaggcatctggttctttcaagtggatggaaggactcagggattcccctctggggcggcatcccatgatgctgtttccaatccctctctgatcaaaccagagcctgcatcccactgagcatctgcactgtcctcagggagaggagcccacagccttcttcccaactcatctcagaccagctcagtttcatgaagtcactgtgagttggagcccatactggactctgtgtcatctgtgtatgtgcatatgtttgtgtgagtgtgtgtgcatcactgggctaggttgttgggaaagtcccatcatgtctttgaattctgttttcacatgccaaatcccagttctgttgggggatccagcctatctcatgacaaactttgaccctggtgtgcacagacctgcacttgggaagatgtgttgatgtgagagctacattggcccttctctttcttattgatactatatcagaaccaacctccatccagtcttgtttatatgagagctcaattcagatttgagagttcaagaccggagatgttactggtccccctttcaccacatcctatctagtacagaatgaccaaaagcatggtggtggaaacctctttagttcagggttagaaatgcattctagttttctctaacctgcatctgggtgttgtcccaagatccagtctatccccaatatcttctcacctttggctccattaaagaatggatttaggtatttggtaagagaatgaaaaatgaagaagggaaatcaatttctcctgtggaagtgggttctttgaactgtgtttggagaaagtttttctggatactaattagaatgtaactcatgttttgagggtatgatgtatatatatattacgaatgtatatatatcattcgtaagatttgaaaggttttgatgcttgaaggaaaaaagagagaggggagggaataaaaaaccttccacaaggtacttgagttagaactggagtccacatttttacaacaccctgctctttttgagcctccagaatcactccagtgctccccactcagttccctggaacatgctggtgctgaattttctttcactctacaaatggctaatgaaactttaattgcttcccactagggggagctgtggtagaagagactgttctgccatcttagtccaagcccttctatcagtaggaggccattttgtctcactatcggaccaggagactgctgagaaccttgagccttggggaaggcttctaccacaatagagaaagaagcgtcagaactaaatggaaggcatatgccatggaatttaaagtcatgcccatgccttttatcaggctatcacatttcagaaactatcagagcctcattgagggcttacggtcattttttgccttcagtgtccttgttacctacttgccctgctcttggcaacagggatgagaagatacatgggagtccatgggtaggaaaatgaggcagtgggaagcaaagaaatgaaaatgggctccaagatgtggaaatgggcagttttgggggggggcattctcacaaggcagaggaaaggggtagcatgaggcagaagaaacgggacccaagaggacatctaagggatgattgctcttggaaaaagcaaaagaaaacaaaacaatactgtgagagttagtcttcatgccttcaggaatttccacagaggactttgagatatctatgcctcgtttccctcttctctgaagatgctcagaggggctacctcaccctcatctttcactctttcaactttctgggctgaagaaatcttggaattctcaacagcatatactactgtcagtcaaagcaatggctagtgccttgctcttcctcttgtgccaacacaaaaagacacagaatgatttcaatgagattgggcccaggctaccagctactttgacccagggtgtttcccccaagagaagccccaatgtgctgtgctgggccaagcagggttcccatgcttttcctttcacagtctcagcaccagcagctatgttctccccccctgagactccagggatgacaatggaattggagacacaccttgtgagatgctgatcccttgaagttctgtgctatacctgtggctgtctgtgcctttgtgtttccattcccctctcatttttgtaagattctgacttctctgtggttttaaacttggtcaaaggtacttgccctggcactgcactgttgcgtgcatgagaggtttgggagaaggctggcatggctcaagaaacaaccactgccccctttgcttgttggtggtcacttatatcactgagggtttctgggagagggctggtgaatgtccagatgtcaggtgttctgtttgtaactgctgtgatttcaagttcttggtgttgttctatgagaggacatcgccccctggtgctcatgaggtgtatgtgcagaacaataaactgcaaatgaacaagcacaaattgttgttactcctaagggcctgcttttgtagaagtgctttggcacctgtctcagaagcacgtgggttacttcctctatgtgtgggcaacctcaatccaactagctagagacagggaaaacccctttattttctaaaactttccacatctcttctgccctacccacacatttgacctatcttgactctgggttcccctcaaagagacagccacacatggcaaaggaaataaggatgtgaactttggctgggaaaagctatcctgaaaagcatggacattggcttcttgtgtgtaagggaatgcatgagtgtgtgtgagggatgcattgtgtgtaagggaatgcatgcgtgtgagaagatgtgtgtgtgtgtgtgtgtgtgtgtgtgtgtgtgtgtgtgtgtgtgtgtgtgaaggtgtgctgatctttgtacacacatactgaggtcaaaggttgacatcaggtatcttcctctactaccttctgccttatcttttgaagcaaggttagctcaatgaacctgaaaattaccattttggctaggataggctggctgaccagtgagccccaagttccatgtgtccctacctgtcagtgctggtgtcataggttcatgctaccatacatcttttacatggatgttggggataaatactcagattctcatgattaaatagcaagtgcttcactgaactgcagatgaatacccacacagagtgttgctgagtacacattttaatgtatatttacacacctttttgttagtagaactgcgtgtttatggaacacatttttaaattttcaataggaagtttgtgcactaagatctaggagcctcctgtgccttgccttgcagactcaggaaatcttatagagaatttacacaggaaaagctgttttgagtagtagaaaccagaggccgtgtgttgagatcctgctactttgggtctgtgggtaaggtccctttacatgctctagcagatcatagatagggtgggccaagaaccagacaataactctctccaatgaacacttacaagtaaagatacacagacaaaggcatttactgccttactcaccgtgtcacactgcagctttcatgacaagatttttttattttttcctttttttcctctaaaatcttgttttattttggatgggggtgcagtggctgagggcagatgcaaagggatggggaaatcaatgggatcaggataccatgatgtaaaagacacagaatagacaaaaagaaagtttgaaaaactggctaactttccacaaagatactgtgatagtatatttattcatgcataaaataaaagtggctgttggatacataaaagaaaaagaaagttgttagcttgactgaaacattacagaattcactcagaacccacagggcacactttaatactgaaaagggcaggtttggtgaaggaggctatgggaccaaccccttgtctgggcagtagggcagtagtagttcaaactcagctgttcactcctacctgtatctcagctggaaatggatgagtaattcttcccacatccccaggggctgagatgcttggagctcttcagaagagcctactgtgtgcacaggcccttgtttgtcaacattaaggagagaacacattatcttccacagacaatagcccactgatggtgtgctgtggtgaatggactcataatttctaaagcagctgtgggggaatttctatgttgtagagaattaaattcgatcttaaaaatgagcaaaaccccaactactgccaggtgtcaatcatgtatcctgacagagatgccccatggaagccatcctgtagttgaaataaatgtcacagggggttctggatgccttttccagttaacttaatgacataacttttgtcacatcagccctgcttctagcagtgaaaaccagcaaagcctaaagggacagaaggtgatgctttctgtatagttttagtttcagggaataagtaatacttaaatgggggcttatcttggcatttgcatttttttcaccactaggaaaataaaagcttcttgttggaatttaggggatgtttatgtgtttgtacccatacctgtgatgagcagacgggaaggagaaagagaaaggaagggtgaaggagagagaaaaatgaaggctacagaggaaggatgaagaggagagagaggggaaggggttatacatttgaaatatgaacatggaaccataatgcttgatctatccaaagtacagctccacttagttcctcgtttataatggctattagttgacagatctaagaattcaattctagaatagtagcatcgtctccagaaccccaggctttatccttagtttgttactcatttcattacagtttcttcatcactcatcccctaacagaaaactgtaagttaaaatattttctgaggacttgttaacactgttcagaagcccaagactgatatagactaaatcctaattgtggggcagttggagaaaatggaatttgtgtaagcccctagcatgcctgtgagatgactctgggagaggaaaatctgtaaattaacacagagtccttaaggctaaagggtagtggctgtgtagacctcctgtggcatttcagggtcatgtctgcttcttggttgtgaaacccagagagcttctttacgaacaaaatagaagtaatgaggtacttagagcatgaaacccttccgttcacaaactggaaagccttttgacttcagactaaattgctaatctccaaatgcagtctccacattccttttcgtacacatgcattcaggtaaagacagttctgagaatggatatgcacccccttcatgccttggtcccagtccagctttttctgaatggatcaccccctcccctaaacctcctttaatttcctggtgcagacaagaagtcccacagctgtgatacctgctttctgttgcagctgtcacttcagtattttggaatgcggaagagaaaactgagtgaaaagtgtgcttgaagctggatatgacagagactgtttcccttggagacaattaagctggacttggatcgtgttcttctttagagactgatgatgcatctgttgctaaacttgcaaccaaactctctcgctcgtcaattgcctggtattccttcttcttgtacttccggatactgtagatggccaaggcaatgacaacccctagtgccatgatgactgccaaagtgattccagcagcttctccccctgacataccactgctgtccccatggatgactgtcatggctctccgcagctccagtggctctcctagcttccactggttggtctgggggtctttaatccaggatctggcagtctcactactggtcactataacggtgttggtggcagcttggctcacgaggggtggtttggtataaggtgggagccttacaggaagcagagaccctcctgtaaagattccagccttgacacagtaggacacttggcatccatcactgataacggctaggtgttggctgaagcccccaggacactttttcagagatggtgctcctatatctttggatgtattagaatcaaccagggggttccccattatacagctaaagaatccaccaaaggggactgaaaacctgtaccccaactcataatccagagaaacacataccttgaggttctcaaacaggctcagtggaaggtagccggctgggcatgactgtgcatttgtcatggggttgatgctcttgtcagtgaagactcccccaaagagaagtcctgagttttcaggtacttggccagtggctgcacaccagtaagccctaaattcagccctggccactcggaagacatcttcacacactgtcttgcagaagattttgagggtgcatttctttttgcattccaggcgactgtaaccctcctcatggttctgagacagcaaatggacaggggtgtagccagagggacaggagaaatcaccagtgagcagattcttctgctccaggttttggcaaagaacatctcccgacagttcagtgcattcctggtaaactccaccaaaggtgaagttggttactttctcatcacaggagccatcatccatattggcttgaaaattgaaattgggggaatcaacatttgtgcagccagggtgagtgttaaaagtgtaatagtgtctcactgcagtttccactgtcttcgacaacttcttcaccaagggacctggcaagccaggcagtttgtcaggcttgatgaagaaatgcagaggcaagccttcacggtctattgccaccaggtggttactgatgcctttctgccaggtttctaaggtgatgcctgggtagaatggaaccccacccatgctctgcacccttgagttggttctgttagaaagatagctcttggtcaaagcattctgggaagtgtagtccgcctcaagtttgaagttcacgatgtttaagaaggcaatcccagcagaggcagttactgtgttctggctgttctgattgtccaggaggaaggaggaccttatgtggtcctcctgaaccagtgcagccccagcatccacactagtgactacgtgtgtgccatagttaaggaccaacagttctgccaggtaggtggccatcttcgtctgatttttctctagctggtcacagatgtccataagtgccttcgtaaaccccaagctcagttctgaagttgggctgtttttgactgtgtagaccaggtttcttacctgaaccctggtggttacagcttggtcctttacttgaagggtcttcatcctttggaactcagtagagaacttgccattgactttggagaaaagggagagttctgtgttgatggaaaatgaggtggtgctctggtaattcacccaggaatccaggatttctgagttcatgtccagattgctctctttctgaggaatggtaaagacttcatcagggatgatgtactgtccatcctctgtcgtcttacagttggtgtatgtcaagtccatcacgcgtcccatgtctacattcctcagattatcccagccacctccaggtaggacctccaagacaggtagttttaaggcatccttgcatgtttggaatccagtcttagctggctctctgagaggcttgtctgtttcagcatgtgctgccatggtccagatgatggccagggccatgaaacctttcatggtgcagacagttcctgccatgttccagccccaagcattcaccaacacgactggggcaagcagaaagacaggaaagaaagcaggtgctgaaatagaaatttctacagttgtcctaaaaaccatcagttcctctttatgctgctctaattacaaaatagagaaatgaaagctgattggaatattagagaccgttagggccttgtaaaaattcttctacactggatatccaaacacacactctttagcatttattccccatgtcctccaccctgcctttttttgccaaagtggcggatacccagtaaaagcatggatccaacatcttacctcttatctatcagaaggcactggtctggctttttgttcactctgcttgactggttttaaaacttcctcagtattctcttgtagaatcacattactagtttcattttactggaaaggaaatgcagtcgttagttgcaactttgccctgatttacaaaccccgccttcactagacaggctgctgtgtcaaggacaaatcttaggtatctcattggcacactgaagttgaaggctgtcctctgaggagggaagaataaagaacctcagatacttttgttttgtgaggtcttgttacaagttctcacagtcctgctttggatatggagttatcagcggtctagaaaagcattccatttgccatatgctgggaaatcccagcctgaattgtcctgagcgttcagtgtgagggtgagggctcccacacaggactgcctctctcctttcagatagaaatattgcagagaagacaaaagccacactgtaaattttgttttactcaaagaatatcatggctcaggagcatatgtatacgtttgtctggtcttttgcatgtatgcagttttaaattaagctgtaactaaccatgcctttaacttttccagcccattattgagtgtttataatcagaaaagctgttctttattactcaggttaaaagcactaacattcatttcttgtattgccagaaaaaacataatcttacgagttttcttctagctcctttagatttataatttagagagatgtattcttcccccattgatcaagtatcaggactaaggaaagctcaaatgaattacatgattggttggaacaactgaagtggtctcagtacattttgctggcagccagggactcagtcacagattcaaaagctgcacaagactccctcaagaggccccgaatcattatgtgagcaagatgcaaagcttaaaaattttaaaaagaatcccatttagccataggttggtgctgtcacctgtgcactggctgtgaagatcccaaggaactgaattatctcaggctgtcaatgagacagcagagcatttttagacagagcaaggctgtccttcacagactgcatctctctaatcacttttcagcctccaatggtgtactgtaaatccagaaagatctcactatgggtctgttcatgccaaggtgtttggggaatcaaattcacaccagcctccaaagacgtatggatttgcaaatcatgtccaaactatcctaagtgggagtttacaaataatcaggggttatatattcatacctcaggagacagcccagagttaaaaaaaaaaaaacctgagagttgaatgccctgcagtagtacttgcaataactcagtatttgtactcctcttcttcttcttcttcttcttcttcttcttcttcttcttcttcttcttcttcttcttcttcttcttcttcttcttctgaaaaaaaaataaaaacctgtttcacagacactcatttgaagaaagcagtttctacttgttctctcttttctagatcctgttaacagctggggatgtgtttctgtgggtgcagtgtggtatgaggacctgagtttggatcctcatgacccacctaaaatgtgggcacaacagtgtgtgcctgtatcctcctgctggagaatcccaggagcctgctagctagtgaatctagctaagcttcaagttcagcaagagaccctgactcaaaaacttaaagtggggaaggaattcatgaaagatcctgatgtcaacctctagctttcacaagtcttgcatgggtgagctcatcgacacacacaccttcctatcacacacacacacacacacacacacacacacacacacacacactgttgagaccttgatgtcttgaagtgagagggcaaagtaaacacagacagctctacattcaagtctttctaaattactaaacattcgatcactttgtattctttttgcttttagaacagttttccactcttaatgttacagaaaaactgaagaaatcatatggacaaaatattctacagataatacaattttttcaaacaattttgatttaatgagaaacccatatgttatcttgatgtagaaaagtggtaataggccctcagcatgactccagatatgtttaaatatataaaattaaaggcttcaacaccaatccatttatagcaattatatctgatcaatagagtttttgaagcattttttttactcctaattttctagagattctttggttttcttgctttttcaacaagagaatgtcttacttatttgagatttttgtttgttttgttttgtactgaatatttactaagtaccaagtaacaatgggtgtcattttgtactaagtaaaacaattcacaatataacagatatatatttttaaatttttggttttgagattacaattatatttctccatttccccttccttcctccaaaccatcccatatacctcttcctattcttcttcaaattcgtggcctcttttttcactagttgttattacatgattataagcatgtaaatatgtacataagtatgtacataaatataaccttctcagtctgtataatgttccttgtatttatgttttcagggctgactttttggtactgggacaagcaattggtgcccccccttctttttaaaatatcaaattacttttggcgctttcatgtgccgggtggttgaacacatggattttatgattcctttgctcaaggaggttctctttgcagctggaacaatgaaacaatgaaaggagaagtgaaaatgatgagaatttagggcacaaccttcatttatatgccagggctggaaagtggggctcagaatgggcaggtaaagatttgactaccgtatctcacttctatttttcctgtttcactcctaccaacaattttctttgctttttcttgtactgaaatacgcacgtaaacatgttctctccaaatggcttccctgagggagtgaagggctgagactaaccactgaactctgacctctagcagagagaagcaattcttctacaggaggtatgcatctgtggggctgaaaagcaatttcacttcctccaacaagcagcaagagggaagtcacacgtctgctttctttcccagtatgaacacgtgcagctcttctgacactgtcatgaggaattaagtcatgattcatgtctgaggctcacttctgtgaggacttggagcctgtccaggtgtttcggacataggtaatcaccagtgatctaactaagatggttgcattagccaggactggcctactttgtttgtcagggatctgggagaccagtctgaaacctgacatacaaggcattgattgctaaatggaacccaaagcattggtacacagaacagagaactgtgacttttgtagaacctggagtaaacggtaatgaaaatggagggcctgtgtggcacagagcgaaatggcattttttttttttttttacttcctagcagttgacttctaaccttatattctgagcattgctttgtcaactcagaagaaattctttgcaccaagtttgtttactaaccacaaaaacaaaacaaaacaagaactcagcggtttcatgctaccctttattgtggagggtaaaaaccgaaggcacatgggaaattctgcatagtcatatgtgaagccagaatttggcagcccaaaccgttttaatctgttattttcctgagacagggactcactgtgtagccctggctgacctggaattctctttgtagaccaagctgcacttgaactcagagcttccaccatattaaaatgggagggaacttggatacagtctattggagcaaaaacacagctttcacctcaaagagaaaaagacagtttattctgggttcaaatacaagtgacctggaaacagattcgggtcactcaaaatggtaacaatttcatgaagtttttaaggtgaaagaataaagacattcataaaccaaggtatttctaaaatgcattggtgggaacaccaggcagtagacttcagcaacgttgcacagtcttggctataagactcaggtgctatctgatggcagtctctgcctttgggttggtagaagccaggggtttgtttctacattccaaaagggatgtcagctgatagttacaaggattaggtcgaacacggcggtagacgataaatggctgttaaggagattgattagagataactcaagataatcacactctggacatgtaactttgcattgcttacaattagaacagttgttgtcagtcaactctgtagaaccctcaacaccactggcgcagcctttgttctgggaacttccgtccactgtttctggttttggccaaacatcgtatttttacatgggaaggccaaagacagtgtcatggtccatgttgctgggaaggctgattcataagagctgatagagatgagactgagttggcaggaaggcagaacctcgagagagagggggagatagatggtaaagccattaagggagaaatccctggtcattcaccttgtgcatttgatactgtattattatatgacgtccactagacatactatacctaaagataaaataatatagatcacaggatagcctaaagatgtaaagaggaagggaacattcattttaaacaatcagtaactttcatttaaaaatatttattcatttatttttatgtgcatcctgagtgcataggcgccacagagtcaagaggagagtattggatcccctgactgacatacaggctgagaactgaacctgtgtcctacgcaagaccagtgctcataaccagagagggatctccagccccacagaaccttctttgtacactagattaactattcctcttgtgtctacagctatttgtagtttgtaacatgttttatttgatgtttgctatatttgacctgacttgttttctttcaatttcagttttctgttggcaaacttgattttacagctctaatctcataagcagcggcctgttttaatatcagaaaatattgatctttaatatctgagttattatagttgtaccttatggataataactagatctatcttattaccttggtattgtgccagattttagtttgggaaagacaataaaaagtcacattatagaaaacattagccttctatatgtattgctgctttaaatattcttttaaaaattgccactccacgtactaaacattattaataacggagagagaaacaagaggtcagacatgcagaaaggaagatccacaagttttgtaggtataaccaaagaacatttcttattttataaccaggaaggaaaatgttgaagtcactttgtaatttttctcacttactttttattggcaaaatcttgcttttggggggagtgaagagaaggctcagtggttaagagtgctagcagcttgatgtgccatgctttgttcaagcctatgggaggcctgcccctttctaaatggagacagaggaggagtgggtggcgaggaagtagatgcagcctgggggagggaaccggagaggaggagggaggggaaactgtagtcagtatgtcaaataaaagacaaaagtgttaattaaataaaataacaatttaaaaaagagtactagctgctcttccagaggacccaggttctattcccagaatctacatgaccactcataactggctggaagtccagtttcaaagggatctgaggccctctctgacctcagtgcacattgcatgcatgtagtacatgcctgtacgtagcaaaagcctcatacacataaaattttaaaaattaagcattgcttaattttgaaaacatgccttgctaattatactaaaggataacttaaatatccatctattcttgttgttaagggagtccaagagataccccaaatgatatagattattgccattgctcttggttgttttccagaaaaggaaagtaagactctgttgctaaagataccacacatggtggacacagagcttagaggaacagatacgaatctaacctgaaagcctccaccctgaggagtataaagttcttgtaatattagaaggagctatgaaagctgtcaagaaagcaattgatcatcttatgtagctgtatcaactacaaaccacaatgctcatcattgcaagatattccaaaaggtccagtagtggtacttatatcatggaggcaatcaacagccacataataagacttaaggctcagccaagtggtggtggcgcatgcctctaatcccagcacttaggaggcaggcagatatctgtgagttcgagaccaggctggtctacaagagctagttctaagacagggtccaaagctactacaaagagaaaccgcaaaaaacaaaaaaccaaaaaaaaaaaaaaaaaaaaaaaaaaagacttaaaacttaaggctcactcaatagtaaagaattcacatcagatactgtaaacttggctaacaacccatgccttgtgaaacaaaggaacctacaggaggatttattaccttggtgttatgacacattttattttgggaaaagaaatggaaagtcacctttcctgttttctagctgagtcctaaacacttatccttatacccacagataagtgtggctcttgcccctcagcaaagaaacttcattttgcagtagacagagagcattacagaaagccacaactggacaaaacacaaaaaataactgactgttctccatcccccccataccacagaacacaatccttaaacctaagctcagaggaccttgcagaagagggaacagcagggtgttgctgtaagagccaagggccaggacatctgttgtaagacagtgttttccaaaagtagaacaggaagtggatgactatagggaggagcctgtgtatcagagaaggcggaggagcagaggttgagtatgatcaaaatacattgtgtgaaattacaaagaattacattcaaaagcattacattaaaaagggggctctaagaaaagggagaggctctattgaggtatgaagtagcatgaatattgtgccattggacactgattgccttttgtacgatttcattaaaaaatgttaactcaaatccaaatatgcctaacaggagtcaattttaaaagttgaagctatttcaaggttgtcaaaaatctgaatttaccatagggattttattgctttcaatttgtcttatcttaatgttttatattcagtcgggcattggcggctcatgcctttaatcccagcactcaggaagcagaggcaggcggatctctgtgagttcgaagccagcctgctctacagagcaagatccaggacaggctccaaagcaatacagagaaaccctgtctcgaaaccccagaaataattagagaactgacagaacaactgaaagcactagagcaaaaagaagcaaactcaccaaggaggggtagacgccaggaaataatcaacctgagagctgaaatcaataaagtagaaactagaaaaacattacaaagaatcaatgaaacaaagagttggttctttgagaagatcaacaagatagacaaacctctagccaaactaaccaaaaggcagagagagagcacgctaattaataaaatcagaaatgaaaagggggatataacaacggacactgtggaaatccagagaatctttaggtcatactttgaaaatctgtactccacaaaattcgaaaatctaatggaaatggacagtttcctggataaatatcacttaccaaaattaaatcaagatcagataaacagtttaaatcgacccataacccctaatgaaatagaagcagtcatcaaaagcctcccaaccaaaaaaagcccaggaccagatggcttcactgcagaattctaccagaaattcaaacaagagctgataccagtactcctcaaactgttccgcacaatagaagcagatgggatattgccaaactctttctacgaggctacaatcactttgatacccaagccacacaaagataagactaagaaagagaactacagaccgatatccctcatgaacatcgatgctaaaatactcaataaaatattggctaatcgaatccaagaacatatcagaaaaatcatccaccacgatcaagtaggcttcatcccagggatgcaaggatggttcaacatacgaaaaaccatcaatgtaatccaccatataaacaaactgaaaaagaaaaaccacatgatcatctcactagatgctgaaaaagcctttgacaaaatccaacatcccttcatgataaagatcttggagagaacaggaataacaggaacatatctaaacatgataaacgcgatatacaccaaaccaatagccaacatcaaactaaatggagagaaactcgaagtgtttcctctaaaatcaggaacaagacaaggatgtccactctccatacctcttcaatattgtacttgaagttctagctagagcaataagacaagaacaggggttcaaagggatacaaattggaaaggacaaagtcaaactttcactatttgcagatgacatgatagtctacataagtgacccgaaaaactctaccagggaactcctggaaatcaactgaagctgataaacaccttcagcaaggtagcaggatacaaaattaactcaaaaaaatctgtagccctactgtatacagatgataaactcaatgagaaagaaatcatggaaacatcacctttcacaatatccacaagcaacataaaatatctgggggtaacactaaccaaaaaagtgaaagacctgtacaataagaactttgagactttaaagaaagaaattaaagaagataccagaaagtggaaagatctcccatgctcttggataggcagaattaacatagtaaaaatggcaatcctgccaaaagcaatctacagattcaacgcaatccccatcaaaatcccaacacagtttttcatagacattgaaagaacaatactcaactttatatggaaaaataaaaaacccagaatagccaaaacaactctttacaataaaagatcttctggaggcatcaccatccctgacttcaagctctactatacagctatagttctgaaaacagcttggtattggcacaagaatagacagatagaccaatggaatcgaattgaagacccagatattaacacgcacctatgaacaccttatttttgacaaaggtgctaaatctatacaatggaaaaaagatagcatcttcaacaaatggtgctggcacaattggattcggacatgcagaaaattgcagattgatccatacctgtcaccatgcacgaaacttaagtgcaaatggatcaaagatctctccataaatccagccacactgaatcttctagaagagaaagtgggaataacccttgaacaaattggcacaggagaacgattcctgaacatcatgccagaagcacagacactgaggtctgcaatcaataaatgggacctcctgaaactgagaagcttctgtaaggcaaaggacacagtcagtaagacaaaacgaccacccacagaatgggaaaagatcttcaccagccccacatctgacagaggactgatttccaaaatatacaaggagctcaagaagctagccaccaaaacaccatacaatgaaattaaaaagtggggtgcagaactaaacagagatttttcaacagaggaatctgaaatggctgaaagacacttaagaaagtgctcaaaatccttggccatcagagaaatgcaactcaaaacaactctgagataccacctcatacctatcagaatggctaaaataaaaaataccaatgacaacctatgctggagaggatgcggagaagaaggaacactcctccattgctggtgggagtgtgaacttgtaagaccactttggaaatcagtatggcggttgctcagaaaaatgggaatcaatctacctcaagatccagccattcctctcttgggtatatacccaaatactgcatgttcatacaacaaggacatatgttcaaccatgttcatagcagcattgtttgtaatagccagaacctggaagcaacctagatgcccctcaactgaagaatggattgagaaaatgtggtacatttatacaatggagtactactcagcagaaaaatgcaatggaatcttgaaattcgcaggcaaatggatggaactagaagaaaccatcctgagtgaggtaacccagtcacaaaaagacaaacatggtatgtactcactcatatatgaattttagacatagagcaaaggtttaccagcctataatcctcttccccaaagaaactagaaatcatcaatgactctaagggataaatggaccccaggaatgggaagtggcatgaactcctgagctaattgagagcatgagggtagaggagtgggtgctgccacaataagagcacaagaggaagagtagaggagaagaaatggaggagcagagatattgagttgggggaagaatagaagagagagagcaggatgagagatatcatatcagagggagccactataggtccgagaagagatctggaactagggagatctccagagacctacaaggatgacacgatctgacagtccgggcagtggaggagaggatggcctagaagcccttcccctagaatgagattgatgactactctctatgctatcctagagtcctcatccagtggctgatggaagcagagacagacatccacagaaatacactgagctgaaatctggaacctagttgaagagagggaggaatgaagaacgaagtggtctgtaccaggttgaagaaacccacagaaacagttggcctgaaaaagggaaagcatattgaccccagaagctctttgtgaggccagtacgggactgatccagccccctgatcatggatgccaatggggaggcccctattctcctgggagcctccggaggtggactggcattttgccctggtgtgtgtgggggactttgagagcccatcccacttgaagggaggcactctgtctctggacacatggggaggagcctaggcccagcacaggaagatttggtggacttggtggagaccctgttgggggccctaccctgcctggggagtggtgggtggatggggttgggggtaggttggaggtgggggagaaggaataggggcgaggggagggagagggagagagaggggggacttacatgtgaaacaagcctgttccctaacttgaattaataataataataataataataataataataataataataataatgaggaaaaaaataaaatactaaaaaaagaaaccccagaaataaaaagttttatattcaatttgtattatcttaatgtcttatctcttaattataaatattaagaatttataatccaattagttagatccagttaatattcttttttcttttttaagtaggaagaacttgaattaagagttttgagtcaacatagaggtacttcccctgatgcagttccttttggaagatttaaaataaattatcaataaaaaaactaactaaaaatttaaatctaaattacactgaataatgggagacaatattttacaaagatagtgaaaatacttgagtcttttcgaacatgatgactctgttccagtaaggtaggaggtctgaataaataatcatttctaacaagaatgtaattaagagcgttggtggggcacgcctttaatcccagcactcaggaggcagaagcaggcagatatctgtgtgtttgagaccagcctggtctacaagagctagttccaggacagcctccaaagccacagagaaaccctgtctcaaaaaaccaaaaaaaaaaaaaaaaaagaatgaaattaatataaaacagcacctttatctatatcactaaagccaatgttagtaagtgataattccatcacctaggattacaccaagcaaattccaaacatcttaaatattgaaaaatataaatgtgaaaagatttaagaaatacaaaaaagaggatcagtaaaaatattgtcagagagggcttaagtctggtcacctggagcactcagttgccagtatagtcgaaaacaggtggcattctgctttttttgatgtctctgtggcattgttctcagaagttggcacaagtttgtggtgagacttaacgaatctaagaatttatcttttaaagttttacaacacaaaaagctagttaaaagtaaccgatactcacgtccaggttaaaggtgatcttgatgttgcttatttatttttaacagattaattaacttgcttggtcttagttaatgttccgagctctgtctttcgggagttcgccgtggattgaattgttagggatcaccttgaagtccctgtcgaaagtcatagagagggagtagcagtaagtctgagcaaaggggtcaagaccatgatggggacccacagagatagttggcccaagcaagtgggagctcactgactccagactgacagctgaggaacctgcatgggaccgaactgggcctttgaatgtgggtgtcagttgtggggcttgggcagtttgtggggcctctggcagtggaaccaggatttatccctagcgcatgaactggctttttggagcccattcccaatggaggaataccttgctcagcctaaatagagcggggagggccttgggtcctgcctcaagagatgtgacacaatttgttgactccccatgggaggcctcaccctttctgaggcatggatggggtgtggtgtggggagaaggcggcaagagcaagggggatgggagggtgagagggagagggaactaggattggtatgcaaaataagattgttttaaaagtaaaaaaacaataaaaaaatcatatgatgtctccttttaatagaggtaactcatgattattctaaaaaatgtacaggctgccccatacttattttataaggagacacggacatcttttaaagggggagtaaattttagcttcctcagagttaagaggaatatcttcggctaatgaagaagaaagcttgagttaatttagacatttagtgacatttgcttatttattcatcaatacagaagctttaagataataaacataatgcaaattttgtgcagcagtccaaactttacaaatagatttaaacatttgctcacaaaatcacctaggattattaggcagaggaacaccccaagagggaatatttttaagtaaaaattttccttttgttaaggtagtgcctatccagctttactcaataggaaaacatgcaaacatagcatttggataaaatctaatcaaattttaaatggcccattcggtaaaaggataaaacacaaaagtctcaaatatggagagctagctggatttggttcccagcacccatatggaggctcactgctgtctgtaactccagttccagcagatccgacaccctctggtagcctctgtggtgaacatacttgcattcaggcaaaacacttagaaaacaaaatcagtaagtctaagaattgttaaagaaattatctaataaaacccttgttccctaagcttgcattttctataaatattattaagagaaaatcaatatttaagaaaacattattgttttaaatagagaatcaggcaccggttctacagagtatagaattttgaccttagaaattcttaatggcctgaaactgaaagcaaatactttgtatcttaaatatctagaagttacaaataaaggaaaaaacactgagccttttctgtattcttttaacaaatttaaacactatttcttaaacgtttaattcttattataacaggcatttagaaattgcttttgtgcaggggagcacgcctttatcctagcagaggcaggcaggtggatctctatgagttcaaggccagggtgagtgcttttgttttaaaagaggtttgtaggagaggtgggggtggggtggtggggtggggagtcctcctcttttgaatcaggcatttctgtctccaccctgttttctgtactttcactttaagtcagctagccttcttctacctttgtagtgagtatattaactatttaacaaccattcaactcatttttttgtttgtttggttttttttgttttgtttttgttttttttaggcttaaggtcttacattgtaaaggacaaattacattaatgatatattaaaacatgttggattaactataaactgtaagatacatttgtaagcctttatgtaaattaagtagggctttaaatgactgtttttttctttagtccccaaactttagagttctatcttatttaggtttgcctaagataaggatcttgaaaaaactgtttttaaaagagccagtagcagtcaaaactcaccctaaaatgtccacattcacacacacacacacacacacacacacacacacacacacacacacaccccttattaaatcagacattccaagagtgttaagtctagtgcaaaataagttttaaaatgtaagacaaagtgggcatagtttaaaaataaatcagctatgtttaggaattttagggcagagagttttgtcccacttaaacaagtacatgatcttgaacacgtgtaacgcagccagaagaggactccttgacaaaacaaaatagttcccttctctaatcatccagaaaagcaaagcctacccaaaggaaaaggatcaaaggggaaaggtgctgtataaaattggattcctatatttctctgtttatgaacaaataagccaaaaaaaaaaaaaacacctccccaaatggaaatgttaatatagcatgggatttcccccctctaggttttctcttagaggccataatagtcttttcccttgatacagaatttgttctgcttggagataaggaagagacaacattagagaacacacgagaatatggagctaacaggcagacatctcagaatttacttttggctctgacagaaccttaagattttcttactttcctccttggttttagcatcacatttgaacttatagcttctaaagctctttttaaatataaattacaaatttcatcatttgtttatatgtattaaaattctaattaagctgtccatcattaattctactgtccaccaaggacttctcattaatgcaaaacaatcccaccaacaataatttaggataaaaatttttcccatgagggggttggagagatggctcagtggttaagagcactgactgctcttccagaggacctgggttcaattcttagcacccacatggcagctcacaactgtctctaactctagttccatgagatccaacacccatggcaaaacattcagtgtacataaaataaaaataaattttaaaaagtttccatgaggcagtcataaaaccaaattatattcacttgtgtaccctccattcccaaatacttctgagctgaatgatcacaattatcaaacataaaagcagatggaggccccaaagccagttttctttagcagttcctctttgggtctcagcttcccattttcttctgaaaaccaccagcttccctaagctagctaggggatctgcgatttgattcagatttctgtgctgcctgagctaaagacagagggggcattaagcaaagagatggcagaaaaatgctaattagatattggggtgatggaaggagaaaaggacaaaagccatcaagctaacaataccctaagacagaacactctgaaacaaacaaaacaaaggaaacacaccctccaaacccctccccaaatatccaaacagaatccttccaaccagctcagaataaacctgattggctactgaccaaaagactgggaggcccaggccccacaaagaacttaccaaaatctaccagaagagacaatgagagttgggtacaagggtcccatgatagtacttggtcccggtttgggtgactcttccaatgaaaatggatcatccttgagttctcatactcaggtgctaaaactgtccaagcaaaaacagagctcttccttgaaagattattcaagagtttattctgtagccaagactaagttaccatgtgcaggggaaacagattcagcttaccttaaattccgttgtgataatggtttcatgaactttttatgacagaacaaagaaaaccataattaaagctatttttcagatacattgatagggacaccaggtaggtagataggcgggatccaacagagcacagaagtctttgctatatgatccagatgatgtctgaagatgctgacagccttaccctctgagttggtggaaaatggtggtctgtgtatacagtccaaaaagtattgtacctgatagccacaagcatgttaggacaaaaacagagctagatggcaaatagctgctaaggaggctaaagataatttggatctggacatgtagcatttttacttgtccttaatcttacacagtcagtcaacattgtagaatctttaacatgggtgcttttgtttgtttttggtgtttgtttttgttttctaggtacttaggttcacagactgaagattttgtttttgtttttgttttctaggaacttaggttcacagactgaagatttagtcttggttgtcagtccatgattgcaatagcacactttgctattcctttgttttcctctgaattctgaggcagtctcatcacagtctcaatacagatttccagaacattctaatggaaacttgtttcgttgctctatgaggtaaacaggaactgaatatctgttgttgatcaggcaatcattgtaggtactattgtgcagtagcctatgtcagatttaatgttttttgtaaaagtcaaaaggatagtgtgaatacttaggtctcccttccccttattgtttcaaaagtgtgtgtgtgtgatatatgtgtgtttgtgtgttgtgtggatgtacgtgtgtacccatgcatgtagaggcccggagctgacttcaggcaccttcctggactgctctctacttaattagcattattgaggcacagtattttttggaacccagagcttactggttttgctattccagttagccagcttgccatctctgcctcgtgcatgctagggttacagatgagccaccatgtcctctcagcacttaagcaggtcctggacatgtgaattccagccctcataattgcaagcactttacatgctactttatctccccaacacgattccctttcatctcctctccaaactcaagtcttcaaagcttgagccagtacaggtaactcctttttcctctccacttttcttcaggcttctctgagaccctactgtgaaaagtctatttatctcccttcagctggaaacaggaccttggcctggagcgctcagcacagaattttattatgtcttcatttcttactactcacatctttctggccacgtgacttcttatttgaggaagatttgggcaaaagaggtaattgagtagctttgggtttctctgagtttactgttgtcagctttcatattcccacatttgttttactatcaaattatacaaaagaaaattcagaataacatttagtgtttcttttaaatgaacaactttatcatttgttataatcaggagattttgaaatgtataaaacattttttgttaaatatatagaaatattctgaaccatagcaaatctgttttgttacctcccttgttgctataggattgtgatgctttgcattgtactcattatggcttcttttctgttttatccttattaataaaagcaatcttttattaatttttttgatttgttgagtactgagccctaaatgggacatctctatcagtaccaccaccacccaggcctaaggaacactgtgaaagagtgggcaggaagaatgtaagagctaaaggaccaggaagaatgccatgaaatgctgtcatccagaaatgccatcatgaacacacaacagcaatagatacctgcataagagtgagcccttcaacattccatcatggctaaaaatgcccatgagatcccaccaggagctattattaatggtacctgtgggaggaggtatcatgttcttcaatggtagcatttttattatttattatcctcctctaatgggccttcagatgaagcaaagtcaaagttaccgccatttttcttccacccaaaatattcatgactaggtcaagacaaaaacaatagcattaatttaggttttctgaggtggttcttccatctcaggatatatgtacttgggagctttggatcctctgttgaaatagaggtgtgtgtgtgtgtgtgtgtgtgtgtgtgtgtgtgtgtgtgcgcgcgcgcgcgcgcgcgcgcgcgcgcgcgtgtgccatcatacatgcatgcacatatcttgctaatgtgtgctggtttcctttggtttggttttgcatagtcactcaagtttcttaattgctattttgacaaataaggatgtgaaaaagagattttagtacagaaataacattgctaccctagtgccgtagttgacatcagagaaggtctgggttttccctaaactttcacctccacagcacctaaataatagcacctacttgcaagggatagatcaagctgctcagaggactggctccgggcaccactagaccattcaggtggtataggcaggagcttgaaggatatcagcttttgctttctgaccctgcaagaaagtctggagattgtttttatagctcatttcttccaggatttggaaaggggcatgttagaagacctgaggatcctgcctttccctggttgtttatgacaatatgaggagccatattaactcagaacaatgcctgaatattttaataatgtcctaaacaaagggaaatggtaaagttgtagtgacatttgggttaatgacataggccaagtagaatgactgatggcttgctttttgaaataattcattctagccttcctttagactgcagcagacaaacttgccctgtaaatgacaaaccagcttgtaagtatttcaggctgtgccagcaaatggtttcttgggttttgactttttgtgcaaaggtgtgtgatgtgtaaacaagcaatcatggctgtgttctagtaacttattacttacaaaaatgcatcacaatggacttgtcctggattctggtgtttactgatcccttattaataataactagattataaactgtcaagatttgagcatgaaaaaaaagctcaataccactcatctatcatgagagaaatgaaatgagaacaggtttcatttcaccccatctagaaggttatccctaaaagacaagaagtaaatgctgacaatgactcagagaaatggaaattcttatgttgtggactgttagtttaagatgtgtgacatttgtttatgctgtggaacacttgtttaatgatgcgaaggtgtgttgcattcttttatgttgcatttgtttaactctgtgcagctgtgttacttagtccacctgattagactaataaagacctgaacatgcaatagccaggaagaagagagaactaggtggggctgccaggcagaaagaataaataggaggagaaatttaagcttgaaaaaaagaggaggtgcaaggattgagaaaaggaagagaggaggacaccaggggccagaaacccagccccacatccagtcactgagtaaggaaagaaagctatgtagagtaatagaaaggtaaaaagcccagaggaaaaatgtagctaaggagaaacaggataatttaagttagaagagctgtctagaaacaagccaagctaagaagctggggattcataagtaagaataagcctctatatttatttgggagctgggtggagtgcccccaaagagtaaaacaacaacaacaacaacaacaacaacaacaacaacaacaacaacaaagccactacactcttaagcactattggtgagagtggaagttagtacagccatatgaaaaatggtatggatgcttctcaagaaactcgaagtaacttctgtatcctctagctcaccaggtgtatacccaaaggaaatgaaacctttctgccaaaacgatgcttgcaccccatgcttgctgcagcactcccacaatagccaaaacatggaaaatcccagtgcctttcacccagtgaatgaggaaactcgaacagctactcagaaagcatgagatcatgtcctctgcagcaatatgaaaagaactagagaacattatagtaaatgaggctagatggacacagaaagatgaacagtctaagctctcaatcatttatgaaaagcagcaagcttatagatggacaaagtgaacagtgggcactaggatgggaagggtcagaggtaagcgggacaagaagagattagcagggacttctgttttacttaaaaaattgtattctttgacaatctcatacttgtatgtaacacattctgcccatgcgcattcctctaccccctcttttcttccaccggtcctcctccttccccctgtcaagtccctgtcccattttcgtagccttttattttgattttgcatttgttttgtgacccatcaagtttaatcagggctacttatgtgggcttggatgtgaaaatattcactgtagcacaggaactcaccagtggttacttctcaaaagacaacagcttcctctcttctggcaatccttagcttccctttgctcccttgggtgagttcaagtgggacctcatgagatccttccccttctatggctgaatactcactgtctatgtcttgagtagtccctatgctagcaactgcagctgtcatgagcgcgtgagagccttgatcacatcgtggccccaaaacagtgtttcaaggcccttcttcagctctcatatccttacctccacaaaaggaagtttcagaaatgggagagggcatggggtggtgagtgctcaatatatacacgtataaaaatatcacagtaggttgggaaggtgactgcccataaagtgcctgccatggaagtgtatggacctgagtttggctctccaacacccattattatgttagccagactgggtagcagagggttacaggtctttaatctcaaggctgagtgaggagtaggaaacaggtagatgcctggagctcactggccagacagcctatccaaaatggttagcatcagattcagtcagagattttgactcaaagaaataaacaagcaaacaaacaaataaggtagagaaagacagaatgcccagcatcctcagctggcctccacacaggcttgcacatgcatatacacttaattaccacccttccccctaatactgcacaaagtcacacagctagctgggaacctggagactggattcaattccccattctgccactaagctgctgtcggctttaaggaagtcaggtctgtctttgagtctctattttcccagctgcagagtcagctaagtcctttccagtgtctctatgatacaaggtcctttccatacaaggtctctatgtcatgtggcccaggatctgcaagccagttatagcaatcttcttgacccaaagctatagctgaatatttcactcagtcaaattaaggatattcttaatttatgccatgcaccatgtgttagtgcacctgctaacacatcctcttggtgaattgttcctttgtgtgatgtgtgatttatgaatcttacttttatttccaccagaactatttgtggtgagggggttgcccagcttgtggtggtatctgtccctgagtttttagctttgcctcttgctgagaggcctaagacactcacacagtgtttatgctaattccttggtttgggtaattgggaactagagtcacatctgtgttgatacaggtcttcatacagatctttgtgactttggggacagttcttaacccctggaacactgaatacaagaccagtggcctgtgtccccaccacatcctttaaggccctggtattctggcctagctcagaaagccccttagggtcagggggaatttcttgccccttctcttgtgccctccccttaaaagaatagttgcaattctaagagggtcaaagtagctactttgtttccccaaaagaagccccaatgtgctctgctgagccaaacagggtctccatgcttttcctttcacagtctcagcaccagcagctatgttctcccactctgagactccagggatgacaaacgggattggagatacaccttgtgagatgctgaccccttgaagctatgtgctgtatctgtggctgtctgtttccctctttttgaaagattcagacttttgtaagattcaggttttaaccttggtcaaaactacttgccggagtcttacactgctttgcgtttacaatgtgcagcactgtttcacaaaaggtaagaatgaacttctactcatcccaagaatagaattgatgaccaaccaagtatggatagcaccaaaggccctcttggtgagccaataaggtttttgtttgtttgcattttgtttttgtttttcttacaggaatatgggcgaaaggttacttattgggtaagaaatgacacaaagacagctacactaccacaccctaccctaacatggggggcagctcacagaagttggaaacctagagcctgaaaatggctcaacagcctggagacttctcttccagccagctcaggtgatatgagcctcttccaggtgattcttcaaggatcattctgcctcttccagacagcctgactggtctgagcctcttatagttagctcagcttgtctgagggcgtttctcagaagtccttactatttatatatgcctaattgtcttagggttctattgctgtgaagagacaccatgaccactgaaactcttgtaaaggaaaacatttaattgggcctggcttacagttctgaggtttagtatcttggcaggaagcacagcagcacacaggcagacatggggctggagaggtagcagagagttctacatctggatctgcaggcagaaggaagacggagtgagacactggacctcacttaagcatttgaaacctcaaagcccacccccagtgacacagttcctccaacaaggccacacctactccagaaagaccacaacttctaatagtgccactccctacaagcctactgggggaattttcatttaaacctgaagcctttgagttgtttctttcccaagcttagggagtgccctggttagtattttgtcaatttgacaaaccttaagaaaatgcctccaactgattggaccttggatgagcctgaggagcatttttcttgagtaatgactaatgtgaaagggcccacactgatgccgtgctgcccccagtctcttagtcctgtgttgtataagaaagcaggttgagtgcctggggagtggaggagggatggctaggggcatgtgggatgtttgggggcggggagaaggtattgacatgtgaagtaagcttgttcctaatttgaactaattaaaaaaaaaaaagaaagaaaaaagaaagcaggttgaggatgccacagggagcacatcagtaagcagtgctctttcatggcctctgcttcagttcctgccttgagttcctgccctgatccttcctcccccttcagggatgagtgtgacctacagaatggaatgttgacttttcccttagaacattctgagtcttaagaagcttccctaccgagatggaaagtttttatatcaggagattagcatgcaacatcatgaaagcattgagaacatagccacccagcataagaaacaattgctgccccctttgcttgtctgttatcaacaccatccgaatggaggtttctgggagagggctggtggatgtccagatgtcaggtgttctgtttgtaactgctgtgatttcaagttcttggtgttgttctacgagaggacatcgccccctggtgctcatgaggtgtatgtgcagaacaataaactgcaaatgaacaagcacaaattgttgttactcctaagggcctgcttttgtagaagtgctttggcacctgtctcagaagcacgtgggttacttcctctatgtgtgaaaaacctcaatccaactagccagagaaagggaaccccccccactttctttattttctaaaaatctccatatctcttctacccacacatttgacctggcttgactctaggttcctcccaattaacagagcacatggcaaaggaaatgagtgtgaacttgtggaagaatggttatcttgaaaactaggaatgttaacttcttttttcttaagatttatttgttttgatgttatgcgtatgagcgttttgcctgtagttttgcccccactcccccggctctgtagttagagggctgtgagtggctgtgtgggtattaggaatacaaccccagagagcaccaagtgctctcagctgctgaatcagctctctggacctggatgctaacttcttgaaagtggcttcacttgactacaatagagtgcatgttttaatcatttgcaagaggatttttttttcttcaaataaatgtttagttttaattattctaacactgattataacacaataagaaatgaagagcttccattatatcaaattctctggccatctctcatattctataggatgtggctttctcagaagccaggccttacttgccacagactccaacctaaggaacccagagcttggcagagccaagagttccacttggagagcaggttgtgactttgtgaaatggcttgactgtgaagcagaaaccccaaattctgatgtcaaacagatgagcactgggacagaatgttactaggcacacatttttaatgaatatttgcatgcatttttgttagtagaaatatgttagtgaaatacttttgtctcactaggaagtttgtaccttaaaggtctagcagtctcctgctgtgatttgcagattcggtaatccttcaaggaatttgcattgaagaggcagcacttgaagaaaaattgttagcttggctgaaacacataaaactcactcagaacccacaaagcaagaaggaaaaagttttcatactgaacatctaatacagaaaagatcaggtttggtgaagaggtcatagaatgaaccccactgactgggcagtagggagggcagaattcaaactcaactgttcactcctctctgtatctcagctggaaatggatgagtaattcttccacattcccagaggctgagacacttggagctcttcagaagagcctactgtgtgcacaggcccttgtttgtcaacattaaggagagaatacattatcttccacagacaatagcccactgatggtgtgctgtggtgaatggactcataatttctaaagcagctgtgggggaatttctatgttgtagagaattaaatccaatattaaaaatgagcaaaaccccaactactgccaggtgtcaatcattttttctgacagatgtcccatggaagccatcctgtagttgaaataaatgtcacaggaggttctggatgccttttccagttaacttaatgacataacttttgtcacatcagccctgcttctagcagtgaaaactagcaaagcctaaagggacagaagatgatactttctgtatagttttagttttagggaggaggtaatgcttaaatgggaacttattttgacttttgtgtttttttacccccggggaaaataaagatttcctgttgtaatgtgggggtgtatctatgcttgtgtctttgtatttgttctaacacttgtgatggatgggatgacatgaagggtgagtgtcattcacagaagaagaaagggttatgtttttggtaatatagaagatcaaaccaaaataattgacctatctaaacaacagtccctttcaatgtctaatttatgatgaggtagacatcagttggctaaaagacatcagccaattcatggaacattggagtcctcttcagtttttacatttcttgatttatttccagtttctcgccacccttttgcttttgacctcatatgagaagtcgtaagttaaaatattttctgaaaacttgttgacatgagcaagaagtctaaaagtggtctgggcaaaggaaaccccgtggggcagaagtgagcttgctatgagccagcagtcctctcaggtgcccagggaattgccacagtcatcatcagttcagagatcaggaggccccaaagcagtggctcaacaggatgtctgtgtcttttcaaagtcctgactgcctctaggagcataaaaccccaaacaagatacagggaaggtaaagtcttctagaccacagattggaaacttctgccaacttcagactaaatgcagtttcatcccaaagctcttgtttctctctggcccatctctttacacacacagagatttgggtgaaggcaacctgtggcttgtctggggaggaacactcccatcatggttgaaaaccagggctggttttcactgaattagttgaaagtcttccctcccctaccttgttcacatagatcctttaattcccaatgcagagacacgaacacgatcactaagttataaaaccttctttttattgcaacagtgactttaccttcttaggaaggcagaggagaaaggagtgaaagagatgcttggagatgagagaaactgtttctttagggaaagaattaagctggatttgaatcctgcaccccgtcaggggtggctctagctcttggaaaagaaggaatcttcattcttcttgaaattccattgtcttgattcttcttaaacctccgggtgccatagatggccatggcaattaaaatccctaatgccagtataaccccaactgtgattccagcagtcgaccccgctgacagtctaccacttttcccttttgatggctcctctaccctcaactcctcagtgtagaatagggcactatcattccttgcctctacagcagagtcggtgtcagactgactcagaagaggtatcttagtgtaaggtggtagcctaacgggggccagggtttcttttgtgaaggccccagccttgacgcagtaggacacttggcatccatctttgataagagctagctgttggctgaagcccccaggacacttttgcagaaatgattgccctaagtctccggatgttgaagaattaaccaaggggttccccattgcgcagctgaagaacccaccaaaggggactgaaaacttgtgccccaactcatgatccatagaaacacataccttgaggttctccaacaggttcagtgaaatatacccagttgggcatgactgttcatttgtcacggggttgatgctcttgtcagtgaagactcccccaaagagaagtcctgaggttttggatacttggctactggccacacaccaataagccctaaattcagccttggccactgcgaatacttcgttacacactttcttacagaagattgacaggacgcacttgtctttacattctgtaaacctgaaaccttcctcataggtctgagacagcaaacggataggggtgtagccagagggacaggagaaatcaccagtgagtggattcttctgctccagctttgtgcagacaggatgtaagacattccatgagagttgagaacactcctgataagcgcctccaaagggagagttggttacctgactatcacaggagccatcatctgtattggcttgaaaattgaagttcggggaatcgacatttgtgcagcccaggtatgtgttaaaggtgtagtagcttttcacagcagtttccaccgtctttgacagtttctccaccaagtggtgtggcaagccaggcagcttgtcaggcttgatgaagaaattcagaggcaagccagcacggtctactgccaccaggtggttagtgatgcccttctgccagtcttctaaggtgatgcctgggtagaatggagtccctccgatgctctgcaccctggagttggttctgttagcaaggtaggctgtggtcatgtcattcttgtaggaaacttccgtgccagctttgaaattcataatctttgcaaaggtagctccagcagatgcagtcaccgcaacgcggtctcccttactgttcttaaggaaggaggattttatatggtcctcctgaatcaatgcagccccagcatccacactagtgattacgtgtgtgccatagttgaggaccaacagttctgccaggtaggtggccatctttgtctggtttttctctagacagtcatatatttccatgagctccttcctaaatcccaaggtgaattctgaatttgggttgtttttgactgtgtagaccaggtttcttacctgaaccctggtggttacagcatgatccttcacttgatgggtcttcatcctttggaactcagtagagaacttgccgttgactttgaaaggagaatcaagttccaagttgatggaaaatgaggtggtgctctggtaattcatccaggaatccaggatttctgagttcatgtccagattgctctctttctgaggaatggtaaagacttcatcagggatgatgtactgtccatcctctgtggtcttacagtcggtgtatgtcaagtccatcacgcgtcccatgtctacattcctcagattatcccagccacctccaggtagcacttctaaaactggtatattcaaagcatcctggcactttcgaaaactagtggtctgttctagaagcttgtcagcacatgctgctgtggtccagatgaggattgtgacaatgaaggtgttcatggtgcagatattcccagccacacactagtcctgaacatccaccagggagcctgaagcaaacagaaagatgagaaagaaagcagttacttgaatggtagttgcttgaaaaatcaacagttctcctaaaaccatttcaggctatgttaactgcaaaattggcaaagaagagctgagtatttaagactcctaggacatgcaacaaaatatagtataccatacatgtgaacacacactctccacatttcatgcccctgttttctccatcccagcatttacccagcattgacaggtcctccgaaaaagcagatcccacatttcacctgttctttacctggagagcctgcttcggctttttgttcactctcttggacttggctcactgttctgttctcttgtcagtctccagcgccagattctttctctgaaaatgaagaggcttgttgctacaagcctcttgaccagcttttatacccaccagacaaggatatttctgcctcatggacaagccttagatttctcattggcttcctgtggttggaggctgttcgtgcagaagggggcgaagtagcactcatgcattttatgatgtctcgtggctataagccctcacgtcctggtgtgtgtatgatgttatctgtggctgagattaaggatgaagacaagtctgtttgtagtatgctggaacaccagtcgctttgacctgatttgtcactcacgtgagtgagtgaccttacatagttgtttcttttcagatagaaataccacaaggaagacaaaagccacaccattatctcagttttaatttatcaaaaacatacagtgaccaagaagtatgtgtacctgtgtacaaacacgtagcttttccgtatattcagtttacaagtatactttttgtacttttaagttctctaactctcagtaggtgtagagaaatgaatgtggctcttcctttcagaattaaagaaatcagaacttgctttgatgtcctttgaagaacacaatttagtttccttccccatctccttttttgtgctgatgccattctgttaaactaatcattcagagagaggctatagaccgagtgatcaaggatcagggttaaaggaagctcagctctatgagttacttaggataattacaatgcgttaattacatttcttcattcctcttttcttcattaattacaattcttcattcctcttttcttgacctcactcttctgcaaggagaatactggcaaggtaaatgtacattaactagtggtcaggggatctagagaagctaagaacactttgaatttcactcccatggctccccaaaccataccacaaccaacatccaattacgtttcaattcattgatcaatgttgttgcctgtatgacctgaagttttcagagaattgaataatcctgggccatcactgatgtagtagagaagcaaggttagaagggatgaggcctgttcctggtcttcacagattgagtttctccagtcactactcaaaccataatagtgttctgtaaatacagaaataccacactgtgggtccattcatgccaaggaaccctgcatagggaaactgatttatgccaattgacaaaaaagggtaagtttgtgaacaatgtctgggctacacttaactggaaatctcaggcacctcagaggatgctgcccttagtttataatcagatgcttatatactactaatacctcaggagagggcagctggactcagaaaactgagcattgaatgcctttgagtagttgtaatgattctgtatttgatccttctcttcaaacagtccagggatggctcatcagaagtggagcactctccccacaacattcatttggagacaggctagcaatttctcattcttcattcctcttttcttgacctcactcttctgcaaggagaatactggcaaggtaaatgtaggtagttctaaatctagatgtttctaaacacttaatgtctgtcttttttctttgctacactcttccttctcattttctggcataggaatgaaaattaatatagttatgaaagccagcaagagttgtataacaaaataatttaaaaggaagagggcaagagaggtcaagaggaggtgaacatgatcaaaatatattatgtatgaaaattccatgatgaagccctttatgtataattgacatatactagtaaaatagttaaattttagaaaataaacactaagattttttaataaaaatcaaaacattttatagaaaacacaattcttttaaaatggtgtattttgtttgtgggtatgtacctctctttctttctctctctcaatgcgtgtgtgtttgtgtgtgtttgtgtgtgtgtgtgtgtgtgtgtgtgtgtgtgtttgtgtctacccatgaagacaaagtggatgtcagctcccttgaagctggagttacaggtagttataagctgcctgactcaaatgctggaaaccaaactcagtattctgggaccagaacaagcactcttaattgctgagccatatatctaaccctacaacataactctttcaaacaattttaataacatattaaataatgatgaaatgcattcaatatcactagatacctacacaaagccactaccagaggtgtctatatcaacccattgatgctaatgacatctggttgataaggattattcaattgccttgattttttcttattatttttgtttttagtttttaataataagtaataataagttctcatccatttatcaaaaaaacagtcagtagcaactgcaaacaatactggggaaaataatcaagaaatgcattacttttttatttttattttttggtttttcgagacagggtttctctgtgtggctttggagcctatcctggcactcggtctgaagaccaggctggcctcaaactcacagagatccgcctgcctctgcctcctgagtgctgggattaaaggcacgcgccaccaacgcctggctagaaatgcataacttttaaaaaagaaacaaatcactttttgagctttcctatgcgtgaggttgttgaatgcctatggaccctgatattttttgctcaggtagttgtgtgttttcaattcaggtaaatggtgagactttggggcacaacctaaatgtgcataccagggcaataaattgattcttaacaggcattttcctttttttttttcattccaccaacaatttcctctcctctcttgcatagagttatctgtgcaagaacatattctttcaggctgggtcatcctggatgaggaaatgcttggagctacacactaaactccggcctcaagcagagagaagcaatccttccgcacaaggcatgcatctaaggtgctaaaaggcacttttacttcctctagcaagtgggaagccacatctgtttgaccacgtagaagcttctgacatcttgtcatgagaagccatgattcatgtgtgatgttcatcctgtgcaggcttggagccggatgagatgtttctgaaccctgtatttcatcatctatttgggattatttcatgggtcaggatcattccattttatgtgttcggtaggaatctaagaggtccatcagaaactcagcacacaaagcagggagctgtgacttctgcggtctatggagtaaactccagtctagattatggaggatgtaccagtaagacaatgacagttgactcctaacctgatgttctgggccctgtctggtccattccttcccctcagagggagttctcccaccaggactatttgtctactaaaagaagaacccagtgggtttgcaaacccttctactgaagaaagagaaagctgatggggaatgtttctgtgcagttatatcaaatgctgggccaatttccagaagataagatgacaaggaatctcttgtttagcatcaaagaaggaaacttacaaagcagaacatgaagaatccagtctgtcctgggtagatctacacagtctagggagctggctctcctttcccactaagagtataactggagctgtggcctaagacagagagggtgtcagaaactgacactgtacacccccaaacagacatttaaagagaaagaaatggagggaaaggttgcacttaataatagaaaagactcggtatccttttctactcaaccatctaccaaatcaatagcaagacaccatttaaaaaactccctgctgtgtcatggcatggcaggtccagactatgagtttcaccagagttataagctaaaaggtagcctgtagaattacttgagaccacaggaagaaactttacatcagaactgcatagtattcacgaggtggaaacctggctggagtcttcagggtaacacagatgcagcttctaatcatcagtatgtcagacatcaggcagtgccagcattgtcaaactgatggtgaatacaagaccgaggtaatctcacccctgaaggacaacatagatgtgacccacatgcaggtgtgacttaggcctgtgaaaatctgccaactgatgtggcctcaaaaagggatgaccagagttggggccaacactcacaactagactcctgaagtgtccacaaccagactgtccaaaggtatagccatcatctgtgaaatattcatggaaaactgttcaatgatgggaacaatatctgtgacctaactttgtaaaggtctactcagggaagtggtaggagtttgaaactctgggaaagaatattggacatcaaagctaaaacactgggttttccataacttgaatattgcttaatgattacatctaagtagccaccggtttgtcctaaattcttattatttagttgtctttatgttttaattggcacatagcatgcattttatgagatactgcatgataatttgatacatacaaataatttgtaatgatcaaaaccagctattaacatttcattctttcaaagcatatcattgctttgtgtttgggatttcagttaaagggagtaagatataaattactgccagcttcacacatgctatagagaactataacttcctactgtttgacttattatctaacttcctttatctatctttccctctccccttcctaacctataaaaacccccatagtattctctacttggattctctgaaagaacgtcaagcactgttaagacctgagtcatctatgcagtcctgaaaaagttttaacaaagggatttgtgcatgatattgaataaactgttaaacatgttgtttataatgcctggcacatcatgtgcttccaataagtagctgctcgcttcctttggttttaatctctagattacctaccaggtaaacttgaatttatttgtttattaaacagatatttattaagcacatagtttgtggaaggatctgcccagtgctttggaggaaagagtaaaggagagctgaggcatggatattagaaaattaggagaagacaatcaggaagaaatacagtgtcagatggagttggggggctattatagtattttataagaatatactccatagtgattgcttggtctttaggactctagtctcaaggaaggcttgacagaagaatatactgactaaaccgtctccctctatagatattgctaataattcagctagtcattgaaatgattaaatgagaacactgtggtgtgcaaaaagacagatgtgattcactgttgatccttataactcaccatggtttatttacacagtcattaaagaaacaagagcttatttaccatttactctagaattgtcttgaaagttatggtttaagatgatttttattgacttactacattctgcagcaaattctctaacacagataaccttatctcacatcatgctctggaatgatgacactactggaatagtcactattagagaaaatgtggagattgaggcaaggttatcagaacagtaagaaagcctgacgtcaaggttcagagagacagcagacaggacactaacaaccatataaggtcaaaagttttcactgatcttgtgagcagttatgaaatcagtgtctcagagaagtttttcttttcaagctgatcatacctagtcacaagatgtcaggcatgagcctcaagccagtctatttacagctgtgtccaaacttttgatattacaacatggcaccatctatgaaatccatgattgagaatataattgagtttttaaaattatccaaaaataccctacaatatttaagtaaatttgcaattttgcattggttcacgttaatgattttctttggctgccaggtaacccctggatacctcagtgtatggcctctcatacgtcctttccctgctctttcctcaccatgaccttatagataaaaactacagtggtcttggctccttggatctggtcttcatggactttatgaccatacacccattatccttgattcttactaaacagtttacaggtaccctactactatattttctctgagttatcattgctgaattcatgtcagtggggactcttgagttcctaattcaaagttagtgtttctgagtatcaccaacctttggatagctaggaatctaagacaagaggaacaggaaatatatcccaataggtaagtgaattggcaagaaccatgctttattgtaatgaagacattgatgaatggcatgtcccttatgactaggctttggtttgtgtctttaagacatggtgtcttggacttagcaccttgtacccaatagtagagaaataccaccataaccatatttattttaccttccaaatgaccaaatataaaatctaacacctgcccataaaaagaaaataagtatataaataaataaactaacttccattgagtaccattgtccagtagacacatcaatttggggtgggaggttctttcttgaaatggtttctttaacttactaacaattttccgagacacactattattttattatttacacttaacaaaacacttaagacatttttgctctgtttttacctaaggcactatagcacagagacaggacatctgctttttcctctccatgagtttcttcaatgcttctttgatctccttgtttctcaggctatagatgatagggttcaacatggggattactgcaccatagaacatggacaccaccttatttttttcctgtgagtggccagtgttagaatggaggtatgagaagagaccagaaccatagaaaagaatcactgtagttagatgagaggcacaggtgttgaaagccttcatccgcccacggattgaatgaatcttcatgacagcagcaatgatgtagccataggagaccaagacaacaagggctgatgtcccaccaactgcacacacgaccaggaagttcactacttggctgaaaaaagtactagagcaagacaaagacatcaggggtggcaaatcacagaaaaaatggttaatgaccagagacccgcagaaatgaagctggaagatggagctggtttggaccaagccggtgaggaaccctcctgtgtatgctgtaatggccatccccacacagatggtgggtgacatgagggattgatagagtagaggattggagatagcagcatatctgtcatatgccatggctgcaaggagacagcactcagtgcctcccattccaataaagaagaaaagctgtgtggcacagcctacaaaggagattgccttctgctccctaaaaaaatcacagagcatcttaggtgctatggaggaagtgtatgagatatcaacaaaggacagattactaatgaagaagtacatgggggagtggaggtgtgagtccatccggatcagggcaatgaggcccaggtttccagccatggtcaccagatagatccccagaaacaacacaaaaaggacaatctgtacctgggggcactctaaaaatcccaaaaggatgaaattggtcatcatgctaatgttccttcccacagccatgtatcagctccacattcttcaaagtcccagagatagaatcctgggggcaaccaaaatccaaacaaagaaactcttcttatcagagaatcatggactcctacaaccagagacatgcccctaaataaaaatcatatatctgatgaagaatttccctccccagcatatggataccactctcccacttatttgataaacttgttactgtgaatgtatatcaagatagtagtctttgcattatttggatcatcaccttattatcaatagcatcacaaccaccatgttaatggatagaaatacttattagtagtacttgggctagcaatctctctcttcttttaaattgttacaaatgttgtactacactattaaatcatttagatttatacatgtattcttttctttttaaagagaagaaatatatcaaaactcaaaatctttgaaaaggtaattttatttctgttttttaaattgaaaattcatgcaatatattctgatcacagtttaccttcccacatttctcccagatcctccaatcctctccacccacccaactccacaccttcatttttctttctctccattttttatttaaattagaaacaagattattttacatgtcaatcccagttcactctgcctcccattctcccatgtccccctcccaaataacacactacctatcccataccctttctgctccccagggagagtgaggccttccatggggggggggtcttcagagtctgtcatatcctttgggatagggcctcggcccagtcccttgtgtctaggctcagggattatccctctatgtggaatggactcccgcagtccattcctatgctagggataagtactgatctactacaaaaggccccatagatttctgaggtttcctcactgacacccacattcatggggtctggatcagtcccatgctggtttcccagctatcagtttgggaaccaagagttcccccttgttcaggtcagctgtttctgtactccacacctttttgctctttctttagaaaacagataggcaaaaaggtaaatcagtaaaagaaatgaaaaatgaaaaaagaaaataaaaaagcacaacacacacacacacacacacacacacacacacacacacacacacacacacacacaaaccccacaaaacccagtaaaaattttaaaaatgcccaaacaaagaaatatgacaaaaagatctgcaaagcaccattgggttcattttgtattggccctctattgctgagaatgggatctacccctaagtgtgatttatatacccagtgagaccccactggagaaaagtaattttcctgttgcagttttatcattatatttataaccagatatcatagactggacctctcctctcctttttcttcctccaccctttctttctctgtacctccttttttcttgtcccctccctgctatctcaatagcatgaagcatatagagataaaacttcgaaaaatactgactaaatcaaagagtaaaaaagtatttactgggaatcagtctacctcaagatccagccattcctctcttggacatatacccaaagaatgcacattcatacaacaaggtcatatgttcaaccatgttcataacagcattgtttgtaatagccagaacctggaagcaacctagatgcccctcaactgaagaatggatagagaaaatgtggtacatttatacaatgaagtactactcagcgggggaaaaaagcaatggaatcttgaaattcgcaaacaaatggatggaactagaagaaaccatcctgagtgaggtaacccagtcacaaaaagacaaacatggtatgtactcactcatatatgaattttagacgtggagaaaaggattaccagcctacaatcatcatcaccaaaggaattaggaaacaagaaggactctaagagaagaatgcatggacccaggagaaggggaaggggcaggatctcctgagctaactgggagcatgagggtaggagagagggatctgggagaatgagagggggagaagaggaagggagaggaggaaatggaggagcaggaaggttgatttaggggaataatggagaagagcaggatgagggataccataacagagggagccattataggttcgaggagaggtctggcactagggagatttccagagatctacaaggatgacaccaactgacaatctaggcaatggtggagaggctaccctaaatgccctgcccctataatgagactgatgactgccttatatgctatcctagagccttcatctagtggctgatggaggcagaggcagacacccatagctaaacactgaactgaactctggaacccagctgcagagagggaggagtgaagagcaaagaggtcaggaccaaactggtgaaatccatagaaacagctgacctgaacaggggggagggcatggaccccagacttatgtctgggaggccagaacaggactgatctagacctctgaatgtggatgtcaatgaggaggcctcagcactctatggggcccatggtagtggatcagtatttatccctggcataacaagggactttgggagcacatcccacatggaaggatgctctctcagtctggacatatgggggagagcctaggccctacccagatgatatgaccaactttggggaacccccatggagagccttaccctccctggggaacagaggggggatgaggtggggagcaggtggagggttgggggaggggagggagagggagagggagaagggattgacatgtgaagcagtcttgtttccaatttgaactaataaaaataatctcttgggaaaaattttaagatgtaagttattattattaaaaacctaatggcatacctgtttttagtacagacagagtgaagttacctcaattctggatgttattatttcttgagataatatttcttgtacttctgaaaatgaaaatgaaatttaacataaaagttatttgagaaacaaaaaagtatttacatatgaaatttgaatgtttttctggcacaaagattaaactgaccatcttgaactgtgtgcttgttagagctaaatgctgatggtgtaaatattagtaacacattattaagtgctgaaccctcaacaaaatgcatagtacagacagaaaacaggtgatcattagcacaccatagcaagtgctattggagaaacctttatacatgccttggagcttgaagatagtaggtagtgtttttagagaaaaaaatctgtgaggagaattgcaaagatgagtaaaggagtcccggagtgggaagacactgtctgagaggtttggggaggtggccctgaaatctgagatgttcatttcaggaggaaaacacttgcagaagtacaggggagcaagcttagtatttaaggtgtaaaaaaagatcagagcacagggaaaggggaatacaaaacacagaaggtaagttctggaagccagaggtggggagacaaattgtgaatgatcattgaaagcgtaggtggaaaaaaagacacatttgttttaaacacaaaaaaaaccacaaatattcaagtatacatacatgtgtaatggcattaactgtaagccattgtatacgtgtgtgcattcatatttaatttcaatctctctccacttccagacttctgatccatttatgtggctccacttttagacagaagcaatcactttacaatgttgcatagatttgatttgtttcttgatttttctgtccttcactagaacagaatcgtaacaaagacagtttgttttttaagaagtgttttcttttttgttgactgaatacccaaagcacttaagcctacacccagcacagagcagggtataccaagtatctagtggataaattcatgtttaagagtttgatctttttcctgaattcaagaaagaaaacacaaatatttatttattcctaaacattctagttctcctgcaagcaggtagatagctggcaaatacacaactaagcacttgtgaccttagtgtaactcagtgttaattgacttacagaagtaggaaggaagatgactgggaatcaaagggaacagagaaagacaaccagaaagttgtttttaaatccataactaaagttaactatagttggtcctttaagcctttcccagaatgaaagagaaaccacacggggctaagcccttggcaatgcctgcccgtctttactatgaacatttgtgtgttcatcaaaggtatattttatccagatacatagaattctttcctatttcatcactgagaccatgatttctaggcttgctgtggtaagagctaaccactaattaaataatacaattcctaggtaggcagcttggttattttgacctatgttatctataggtaatgataggggagagtatatgaggccccctacattcccttataatactaatttctgtctttatcatggcctgagtactaccatctacttttcttttctttcttcttttttttttttgctgggtgggggcatttatttcaagacagggtttctctgtattgatttggaggttgtcctggaacttgctctgtagaccaggctggcctcgaactcacagagatcctcctgcctctgcctcacgattgctgggattaaaggtgtgcgccaccaacgcctggctgtactaccatttattattagtttgtatttgttgttgctgcttctgcttgtggtggtctttttgcttttcccccatggttttcagcttatgtagcatctctacacccatgttcctgtttgtggttactcaaagtagggcttggaaaccaaacagagcagagctagtgtctaatctttgatctcaattcatcagttttgtcatactggacaagccagtggtgctgagaattggctttggagcccattgcatactaggtgggttttctattagtgagctatatcctcaactcccaacatatcacatatacatctcttcccgtgttttcccttaactttaagatactggcagcatagaaaaagagataacttcattatttcaccagcaatcagccttatgcggcttctgaccaagattctcatctgcatctacagactgaatgtgacctgtgtgtgtgtgtgtgtgtgtgtgtgtgtgtgtgtgtgtgtgtgtgtatgtacgagcacacacttgtgcagcacagcaatggttacactggcacttcctctcatgctatcaccattatttatagcatcatagtggttcatttcacaacacttagcatgctttgtatttttgttggatcccttctccttaactaaaagctatgggatgacattataatccaagttctttacacctcatagacctgaatggtattaacctataatttacatatatatatatatatatatatatatatatatatatatatgctgacaagagatgtattgaaattatgtaagaacaagcaattattaatttgttgagtcaacatttaagcttctaattctctgactgccaagtctgtagtctttcctgaatcctaaacccatctggatgcagagctgggcaactgatgatactctatcattgataccactgcatgagatgtgatctttcacccagccagtgtgactggacaggaccagaatctgaaaatgattacaaagagttttcttgtcctcaatctaggcagcatgattaacttttaacaatcaagttaaataaaatggaatagctctctggtgtggccattcccaaataaatgatgtctctgtggggctcacagtgtgcacccatagttcagtggttctgtaggatgtggtgaatgaaacagaaagaccagcaagaggaaaaagtattttcttggatcactttccctctatcatttatcagagtgcttggattttacagatgcccagtggatattttgttcactggctgaataagggttaccacacataccctataaatttgttctattcccaagaccctgggacttgccctattttaagtacttcctggatactcagaaaacactgagttttatttaaactaataaaatatcacagctgaaattcagctagcttagacttttcccactatgattataaaactaaagctaaaagagataggcagaatgtcaatatagttggttagtactggaaatagaatttgtatctcatactttgggaatagccctttacccaccaccttcttctaaagcctggtgtctcaatgaaaggcacaaaggccttttactttgcaggcacactcatgcttgcacaccctgagagtctatagcaacataaaaaatactggcctttaaattctggtactattattttgtctacattttactgtatgactttcgcaaaacttaattcctcctctgaatcctaacctcctcttcttctgaaggtgcaaaaaaaatgattaacttagctcatttctcttcccatttcatactgtaatagaaatgtttcaaagaatcaatacattctccaaattctaaaatccaaaataggtaaggtccagctcccctcattaaactcagagcagtgagaccaaagttccaagcatttttcctgcttcacctttccttcttttgtcatccagggattcacaggtagccagtccaaggaagggggaaaggcagactcacctggagcaccttaaatttagtgcttcagttagctggctgaggccagacattcagagagagaacaaagccctttcctgccagaacctggaaggcaggtcatattgaaggatacaagttagggttggatatagccatgttaaatggactgtcaagagaccggcttgtgtttaaaaaaaatcaggctgtctccaggtgccattgagtctctctgggcgttaatatctccccaagagtcctagtgggcagtgtggatggatacctgggctcaggagtaaaaagaatgccagctttgtctgaacaaacaactctctgaatcagcaactctccctactttctttatattcccagtccctcatctggctccagtgacagctccctggagtcactgaacacaattctagtttagctctataatggacaagagccccctatagtaacactttgtagaatggtaggtgttttccgtggcctacttgaattactcggggttagaactgggagtaaattagtgcaaacctcaggaaaaatggagggagagagaagaaaggaggggaaaagaagtgaaagagaagagggagagacattgatttttaggaaaacaatagcatggtcctaaagtggagtgggtattcccgaaaggggtcagtcacagagagagtgacaacaaaggggtttaacagtcaagagtctgaattcattgacttggtgatttcttttttaaattatgggattctagtttaccaaaataaagagaaaaggacacagacggttactaatgttttttgttttgttttgtttttttcccatcgcatggacagcaaacagaacatcttgcacagtttacttcataatatcctcagagaacccccaagaaaagccatctgcagcagattttcacatgagaaaatggaattttggagaagtagcttgcctaaggtcacacaaacatctcttggcaaagcagagacgtgaacaaaatccttccagtatcagaagtccatgcttggtcttctgcactgaactgcccccataaaaagacaaatggcaacaaaaaaaatagctttcaaaaatctcacaagtgggaattttaaagaaaagttttgggttttgagcagagcaggatttccctcctatttgcagtttgcttttgacttctcaaacatctagcttgaaaagatttgagtgtgtgcataatgcagggaggagcaagccaggacagaagtgggcactgtgcaagcccacagagaacactgtggcttctttcgtgtgtttgtgcctcatcctatttgtgttggctgaactttgacttctatgaagatgagaaaatcctgtagcaacttggcttctctttccacagcctgagcagcttcccctcgctcaggccagtgtctcatactataaagccaaacaaattatatcctctccccaaattcctagctcttggccctatgcctacatttttgggggactttctccagcttgacattaaaggatggatcatcatggctaaagtcatagtttctatgtaattaaatcttttctaggaaaaagaaacccacaacaaaaccgaaacaaatttctagtttctttttctaactgcagagtgaaatatgtatgggtggggtggtagaagactgtagtgtttacaattcctgtctcccttcccgcctcagaaaaatattcttctctctctctctctctctctctctctctctctctctctctctctctctctctctcctctctcccttcctctctctcctctccttctctcccttctctctgctctctctctctccctctcctctctccctccctccctctctctctcctctctctctctctctctctctctctctctctctctctctctctctccttttcttctctttcttatttgaaccattctaaaccaaggagccctcttctcatggcagttaacccccaggcagttatttgtgggggccagaaaatcttaagtttattattcacaacctgccacaaatttataacaggtccttttaactcttctgtctccatgccttcttgttccttactgaaggatgttcattaatctgttacttgtgagtggcccagaaacatcctcagaggcctcagtacttaagtgatattttaggaaatcaaagaggaacagtgtgaactcacatgggaagaagacaggaaagtgagggcttcccatactatgttgacagacagactcaagagtggagctacacaaatcggggtgcagtaatgggctcaggggtttcttgagtagggctggatactaaagaaagtgataggtaagtttagcaagaatagaaggtaatggagggcctagaataatgcctcagtagctaagagtgcttactgcttttccagaagaccagagtttggttcccagaaccactttaggaagcttacaaccaccagtaacgccagctccatgggagttgatgccctcttctggcctctacaggcatggtagacacacattcaccgaggtaaaaaataaataaataaataaatctttttaaaaaaaggaaatggtgaaataagtgcattcagtactatgctcagattggcaaagccagagcaagcttggaaaaaagggctggggccacatagagggactctaaggcatgggtcattccacactgctctgtaagtcatatcccatcactggcagggccagtgattttgtgactctgcatatgcaagaagatggctgtctgagaacagactccagcaagaaaaaaatagaatcagacaaggacctagagcagtcatatagaggagattctgtaggctgttacacttttcctcagagtcttgcctatctcagaccactgaaaataatatagaaagtcatgtctattttgctgggtcaaaggggaaatggagaaaagtttcatggaattgtctatgtcctagaacagtcttgtaggcagtcatgggaaaaccaagcaaagaattgcaagccacatctgccaggtatctgtgtcaccacacacaatgtgtctattatctgctctccaaagaaattctgttcctttttgatcctgctcagagtgaaggtgaagagccttttctggaaactcacagtgctgtggcctcctccactgacaagccaccctccacttctccttttgtgtagaatgatgcatgcaattgtatattaaatgggtatgtgggggggtgcatgggcacatgcgtgtgagatcagaggctgagggtgaagtcttccactatggccctacaccttatcatttgagacagggtcatttcctgaactcagagctcactgatttggctgaattgatttggcagggagctcttgtaattttcctgtctcctctgtgaccatgcctaccttttatgtgggtgctgggaaatctgaacccaggtcttcatgcctctgcaataggtactttgtcaacttagccatcccctagcctgcttaactttttcttaaagagtcatttggagattgggaacacaacaaacatgtggccattgggaatcaagcatccattacacaattggcattgcagcgtggattttaagccgtccccttaaaatagagctgaacatgatgtgtctctggaaaagtacgaccgccgtcaacttgctttatcttaacagtgacattttgctggtggggttcaattgtaagaagaggcagctatgattggaggcaggtgttaacagatgtccctggagaggcctgcccagctgaagcctagatgaagccctgtctatagaaatccacaaagaatccagcaaatggaacacatttgggttgacacagtgatagatggtttgggaaggctagcagggaaaaggagagatggcagttgtacatttcaagcatctgcttattttatagtcattaattagcactgaaaatacaaagtggccgggcattggtggcacacgcctttaatcccagcactcgggaggcagaggcagggggatctctctgagttcgaggccagcctggtctccagagcaagtgccaggataggctgcaaagctacagagaaaccctgtctcaaaaaaaaaaaaaaagaaaaagaaagaaagaaagaaaatacaaagtgagtcaccatcttattatgtgtgtatggtgcatgcgtgtgatgtgtatgcaggtatgtgtgaacaaagaccaaatattcaggtatcccgctgtatcattctctacataattcccttaaaacagggtttctcaccgacatggagctagggagatagatagcaagacctagttagtgctcctcctggggttacaggtgcagtcatgtagccagatccagattttatttacgtgggtgctgggattagaactcaggtcttcatgcttgtgctgaaagcacttacacacactagaccaagtctccagccccaaacaattaaccatgaaattctctctgccagatggaacagagagaaagagagagagagacagcagcactcaccaaagatgagtttctttctgtgcaccgcctgcaactttgattgtaatctgaaggcatcattcctctcaaactaatcatcattgtgtttgggggttatttcagaagcaatcacatgactaggtttggccaagagggacttcttgtcctctcatcaagaccaaattgcaaactctgccatgcatatttgtaaactgacttttcctctctggaacgctttcattttattgcacacttttagccctctatggtttaatgtcctctctgagtagtacacttcaggtaagatgggaaccagaaacacaaacgcaatgtttccaggctggcatctctcaggattccctggctgagcactcactgcctggatctctgtctccaccaacttaaaaacgcccccttacaggatgtgccagtgaggtgcaccccaaacttcaccctagtggaaaaccacttgctaaaatctcaaactccaagatatctgcctgccagaatgtcccttttctattgtatatacctcatcgagcccgttttttcagtgtcataatgcatcatatctgttgcaagaggttcttaccaggagtcttcacactttcttcattttcccagacacttccttaaactttttcagggtggtttttggtgggcataacagtttttacactttaaacagcttctcatctcacaatggcattcattactgcacacaagatcttttgaacttctggttgactccctgtaatgtcccctagctatgttagcacaactattccttttttgtttacgtgtttgtttttttgagacagtctctcaatgtacccttggctgtcttggaactcactttgtagaccagctgacctcaaactcacagagatccacctacttctacctcctgagcgctgggattaaaggtgtgtgccaccatgccaggcacaacgatttgtttaaattgattaatgtttattgtatgaagtgatgggcatcataatgacctttttaaagtatattgccttctttgagtgtttttgttttgttttttggagacagggtttctctatgtagctttggaacctgtcttggcactttctttatagaccatactggctctcaagtgctgggattaaaggcatgtgccaccactgcctgtcatctcctttgaatgtattcatttctcctcctcatctcctgctcctccttcccccatccaattccttccctccccagatagtctctcttatattttcataccgggtgtgtgtgtgtgtgtgtgtgtgtgtgtgtgtgtgtgtgtgtgtgtgtgtgatgtgttctaggttccacacataagagaaaataggaaatatttgtttttattggtcaggattacttcactgaatactacagtttctaaatctattccctttctgcaaagacactatttcattctttgtaggtggataacactatgttgtgaggctggagaaatagctcagtagttaaaaagcatttgctgctcttccagaagaccaagttcagttcccagaacccacactgaacagctcacaagcacaatttactccagttgcaggatataatactctcttttggcctacaggagcgtgtaagtacacacacacacacacacacacacacacacacacacacacacacacacacacactacacacactaaaagctagaattcgagggagagataattcacagtatttgtctgaatctggcttgttccagctttgcccactctcctgcaaatgtcaccacttatttttttctctaaaggtgtataaaatatcatttttgtgtatgtgcatttttattatccaccagctgttgacaagcacccaggctgattctattccctggctattgtgaataatataacaataaacatagctgcataagtatctctgatgtatgttgagttttttgggaatgtgtccaggagtggtatagctgtgacatatgagacgtgccttcagtggacaaggatttctttctcttgccagtatcttttgggatttcatttcttcatgatatccattttgactgaggtgagatggaatcttgaagcaaattttaatcctatttaatttaactgtatgggaaaagatattaaataattttataaatatatattatttgtgtttcttctttagagaattatctaggcagtttattttattaaatcagccctttgacaatttcatgcatgtatacagtgcattctagttactctctcccctgcctgctcttcttacttccccactcccagaacccccttgtccctgccagtcctttcctgcagatgcatgactttctactttgctgcctgagccatttagttaagccctttctgtgtgaccattagattgggactattggagcctgatggcatcatcagtggctacactggagtaatgactccattccgctgactctgtaggaaatggttcccctatccatgcctggctgttgggtggcctgttcttctgcagatccagtgcaggcaactgcagttattggaagtcatgattgcaacaattgtgcattgtcctaagaatgatgttttacagcccttctccctgtcttctggctcgtaaattctttctctcctttctctgcaatgttccccaagtcttagaagagatagtataaatgagctcagcagtcacttattctcagagccttgtgcagccatgcatcacagcctttcctgcagttcactggaataaaaaaaaaaaaaggcttctgtagttaggactgacagtggcaattgtctatgagtttaagcatgtatatttagaaggcagtttgatgctctgtcaatttaggtaaacaaccgaattaagttctaccctagtaattagttcatttgttgactagaagatttgggatgggaatgctggtatttaatttggggagtttttatacatcctaaatgttaattctctatttgagttataattgacaaagattccccctatgctgtaggttatatctttactctggtgatgatttcttttgctgtgcagatgtttttaattctgtgcaattcctatttgtagaatttgggggttatttcctgtgtgaatggactcatttccagaaagttcttgcctttgcctacatcttgaaatgcttcccacagcagtttcaaggtttcatgtctttgaccccattttgtgttgatttttattctgcaaagaaactttaaaaaatataatagctttagttaaaacagcagctgctaactttggaaggagtggtttgtgaagaataatcacaaaatgtgcaatgagggatattcattttctattaccgcataatgaattagtacatgttagcagttgaaaacggaggcgcacgagtcatttctaggggtcacccgtccaggccagcacagatattctcccttaacagaggtgctttaacaccaactgcaagaacaaaaccacctcctttggcatcttctgaggtaggaaagggagccatttggagctcactttgtagaattgaggaagtcaaaaggtgaagccatttgaacaatgattttggcttaactcaaggaagattttttttatagccagagttttgatacttatttaaaacttatgaggataagagatcacaaacccacatgaaacgaagagaggataatatatgaacagtgtctcaggatgcatgccaagacaactggagtgataatatcatttgaagtgacaactagttagaaaaaaatcagtattttgttttcatgaatgtgataggaatgttaacattctctccccttgggtgacattggtgtacatccatgtctggccccctatctgctgctcattttctaggtcaccctcaccaagtgtgagctgagcttttactgcctcacctgtagatgtcatgaagatgcaatgtggatataaactccgaagggtcacacacataaaattcagcatgttatttcaaacattggacctagtccaggtggtggaggtacacacctttaatcccagaatttgggaggcagaggaagatgaatctctgagtttgaggccaacctggtctatagggcaagttccaggatggccagagctactcagagaatctctgtcttaagaaaccaacaagcattagacttgtaactagccctatctactcacagactcccaggcctttgtctgtgctgtttatgagtgcagagtctcaggatggccctctctctactggataagaaaagcctaaaagtgtttcagattactttttagttaatttttttagaatatcttatatgcattcaatctatttttatcatattcctttcccttctccactattcaacttctggtctcttcccacgtctttctcccagcttcttgtcctttttttcatacaacccactgagttcaactagtgctgcccatagaggcatgaatattgggccatccactagaacttggtcaaattaccagggaccacacccttgaagacaactgaatctctttcccctggcagccatcagctgggggtgggggctcatgtgcccctccctgctccatgctgacatgttgaccagcttgatattgttcatatcatgtgcaggtaaccacagccacttgagttcctgagtgcagcagtcctgtgatgttcagaagacactgttccttcttcaacctttggatcttagaatcttcctcaatggtttctgagtctcggggaagatggtgtaatatagatgtccaatgtatgactggacattccacagacacttccctgtactttgatagactgtaaaattgtgtattatccacttccactgaacaaagatgcttctctgatgcaggctgagagaatttcatattttgataactcactatgtcaattcagaagttgtatggaaaacctcgctctattttacatagtgtttcttgttctgtacatatattatagatagcccacaactaacccacattggtgcaagtcaaactatgttttaaactcataagaaaacaatgactatttccagagaatgtatgctaacttcatcatatctacttctatctactcctactgtcctcacttggctcagttctatggcaaaacatccttttccattgactgataatacagactgtgccatagcacaatggatggggaatgctacaaaccctacagtcttaggtggtcacagctcttccaaggcttgaggtaggagacttcagagctccgcaggtcacacagaacatgtggcctgtatacttctctgaatggttgattcgaaagtgtcttctgctgacaaagggaagtttttgcatttgatggttgaatggttagtattttatttgattttaaagctttccttaaacatattgtttgcatgaattacttctttttcttcccttcattaccataactctaaggatattcatctcaggatgacagctgcccaagctgatcggatacaggttcaagctttcccctccccttaccctcccctcacgttccctttcgtcctctcctccattctttcctcctttctctcttttgcttcctccctctcttcttctctctcacctttcctttctttctttccttttccatttcttcttttcttccttttgtggatatatactttccagtgaaactccattggagaaagcaaatgtttcctttgcaattgggcatcaactgaagatagcttctttgttaggaattgaaggctgttttcacttcccctgcttgtgttgggaccccatctaggttgaaactgtgcaggccctgggcatgctgccagcgtctgtgagttcgtatgtacaccagtcctgttgtgcctggaagacattgttagaaaaggtgagaattttaggggatgtttgctccattttactgtaaatttttaactgccttgttctctttaatggtaattccaatatttggagtttttattaaaattctttgaatttcataaaacagtattatatttatataatttccactcaattcacttttcatttgctcccatgttccccggctccctctcagattcatgacactttctttaattacaattctacatgtaacatatatgtatatgtagattgctaagtctgtttagtgttgctcctatgtatatgcatttagggatgaccccttggatttaataatctatcagggggcttgtctttagagaagacttattctccttttcttggcagccattaattgaatgtaactttttatctaggagtggtccttgggagatttacccattcatgttggcatgtcaactggtattttattgtcattgtctttgtcttgtttaagaaaccatattttgagatttcatgggaaaaactcagtgtgtgtgtgtgtgtgtgtgtgtgtgtgtgtgtgtgtgtgtgtctgtccacgcacaagtgagtctgtgtctgtatgtgtatgacactgtctcacagcagaagtcctgattctctgactctcacagtctttctaccccttcttccatgctgtttcctgagctttaagtgtagggactataaattgtagacatattatttggggtttgggcaacccactgtctattattttctgcattttcatcagttgtacattcttataatggactctgtttgctaagcaaagaagtttctttgataaggggtaagaactaaaattatctgtagaaataagcataagtatttagagtacagttaagaactaaaatataatggtttaaggaagtgaaagtaatgggtcctcctctacagtcaatgaccccaccagccatgggtaattggctggatttacagtgccatgcatgaattccctcctattgactggtccttaagtccaattagatggctgtcagttatcaacaagatttaagtgccactactgaacctttaagggacaacttacaatattggtcaatgttgtggtttgtagactttatagatgggtagggctgtgtttgtttttctcccctgacaacttgcgtaacaccttcagatattatcagagctcgtcctcaggaagaaggcttataggtaaattccagctcaattcctccaagtcctgaagtatgtgttgtctttagcaatagactcttaccttcaagttctgggaggaaaacaaggacaacagaaacatagtatgttgttttgggagtctcatggactaccctgatcaacaactccaacaattcctgtaacagaaggttttgttagctggtggtctatgactcttggggttagcattatcattttaagtgatttaacttcatttaaaacatatgtacatttaaagtcaatataaaataatgttaccacatggttgtgtcaagcacccttagtgttatttatcccttcttcttcctcccactgtgttggccttcccttctggcagttaaagtctttcagttctgtttgtatggccatgtttctaccttgtaatttctggttatgagcatttggctcttcatgttgtatttcattttacgatgaaaaattttgtttcttgaacacaatctgtagcatgtctaggatttccaggaaggtgatctttcagactcatggggtcatattctgacttggtgttgaacccttcaccacccagagcatctacacaatgtattgagccaagtaatctacagctttgtcaggactctctcacctctactctataaaacctagtttgtcactcatttactctcctggttgcccagttttgctttatccgtgtctagcttatgtcacacgaagtgaggggacatataatatatataagaggactttatttcaattccaatacttcagttattctagatgtgagggccatacatacatacctgaatatacacacatactactggtgcagaaatccttactaaaccccatctcttctcttagctgtatttaataatcttaattctttgcctacatgcacagtccaaggaaagtgattcatcctctgaagctagaattgtaggcaattgtgagttgcccaacacaggtgctgggaatttaactcaggtcctctgcaaaaggcaaaacgttcttaacctctgagctatctctttagttcataaatggtttttaggtctaatgttcccgtcttcttggccttttgggagaactgtttttattcttggcttacaaggtctgctaagaatcttaagagatggggctagagagatgtttcagtgtttaaaagcacttgctgctcttccaaatgaaccaaattcagttctcagcacctttgtaaggctgctcacaaccgcctgcaactctagcttcagaggatccaacaccctcttctgttctttgcagatacctttgtaaggtgttatcacatatgcaaactcatagataaaaattaaaatgttctttaaaatgaatcttaagggaggacttaactgtgtttttgatagccttgtatttaaaagtgcttgccatcagaacccctgtcaaatagtttttcagttacaaattccatgcactgacaggtcatatgacagtagaggacaagcttccactagagagcacttacttttcctcgtacccaaatcaaagccttgagagagtcataattttctttcttgtccaatgtcttctcttaattctgtatcacactgaggtataattacgttaaacttttatatgtgtgaatgggtctcttatcaggctcccaagtagccccattttcttgaattccatatgttctgtcatgccacaatatttttagagttaaatagattcctaccatgtgtgaaagttatcttcagagctatgtatgttcttaggattgctgttttttatattatgcaaatttacatgctgaacatttccatagttttgctcagaaacatattttaagatattttctgaaaattgctctacccagtaccatttgttgctttatagaagtcatgatgtgtgaactttgcctggggaaaatgaacaaatatcttttccctccagttagagcatggtgaaagaccaaagaaccagtcctactcaagtctcacttggtgaattaatatgtttaataagagttgcttgcaggatcatgggtgaggattgtttacaagactatgagcaactatggactgaaggcacaattacctggataaagaattaacatgtatttattagggaaacactcacacaatgatggtaaataaccacatcggtcttcctgctcctgaagatgtagtctctgcccttcaggatgctccaactacaatcccagagagatcaaaccagtcctcttccttaaaaggggtcatatctgcacacctgaaatcatgccctaagatgccgccaccactccaagtccactggcagaacaagatgccactacaatggccagctacaacactgaagaaaatgtggttttcacacattggtctctcaataatgcttgtttttcatttattgctctccctgacattcacggggccctagaaaagtccagtgtcccttatggctcagatgagccaggcagtcagacactgactttccctcatgttgactcagtatgcatcccttgtccttggaactttgtgtcattcccacagtactcagatttataccatccatcctcgtgcttttgacctacagtatcctataagagcttttaaaatatttatttatttatttatttatttatttatttatttatgtttttcgagtggctttagaggctgtcctggaactagctcttgtagaccaggctggtctccaactcacagagatccgcctgcttctgtctcccaagtgctgggattaaaggcgtgcaccaccactgcccagctaaatttcccttttaaagtctatccaaattcaagcagttcagacacaaatagtctctgattatcatagtttccagtactagaccatctgcatgctgtatcatggactctccctttttacattatcttctatcatgtctcctcctcttcactatccaattcttcccataggctgcttgtctttggatcacaggagggtatatttagcacagttttaagttatgttctctttctcttatatctcccagaaagaacccatgaagccaacatctccatctcatcttctctttcttctgtcagttcagaggctactgtggagagcagcatctgcctgtctttttctcatcgcaactcttcccttaaacaggcaaattctttgtgagtgcacagttcaatcttggttgcatgtattatttccaagagcaatgaccacctaattgatgccacagtctacatacaatcccatctcatatatgctactctcaggaactgtaacatctcctctagtccaccagtcatttgagaggcatccacatattcactcctcatcctcacagggagtcttgccactccataccacatacaagaagacagttactctgggatttcctccaagggaggaatttaacttttcagataaattggttagttacatgtcttctcattcatatcagggatggtgcaactagtaccgcagcaaggacgcatgctattctatgccacattctgaaggatggccacattaggattgccccatggctgctccactcccaggaaacttagcttccactgtttgccttgtcactcacagcagacagtgaaagtgctcctcttaactcagctttggttctgtcctgtcccatgattgagcaccaagggttgtataaacatgttcatgtcctgggagacatgaacaaatgtctactcacttattgtgtagtagtttcttatgaaatcgagacatctcattcttcagggaagttcatttaataaaggcagtaaacaactcaaataggtttaggaagtccctgaaactgactagactcactaggccctcccttactaagagtatataagcagtaaaagtggctaaaagtcactctcagacaagcccagcctcctggaagtcacaaagaccaggagagccactaggaaaaggattagaataactgagccaactgaaaaagacactctccaacctgttgagtggcctacaatctgtgcaatgtgctccaggttcccagagtttgtgttctgtcatccatgctagggtggattttagtgatacacctctctttgagtaagcaacccctcatccatattcttgtaagtaaccccaagaaaactcattgaactttgatattggtactttagtctgtcatcagttccctattagaggtgagtaaacatttgtttggatctacctagtaatagtgtctcacaacatcatcccagataggacaccaatgacagaaacaaagacatgatcccatccaagtgtagtgtagtatcatgaaaacaattttcttcattctcttgcaggctttttaatgtgtggttctgaaaataaaagcctagaaaacaagttctagaacaaacactttattacctatttccttggcagacaatttaggttaaagcttagaatgacactatccccacattctcatctttgtctattggaacttgcctaagcatcttgtcctagtcagggtttctattgtgattaattaccatgaccaaaagtgactaaggaaggacagggtttatttcagcttacatcttgcagtccagaataaagggaagtcaggaaaagaactcaaggtaggaacctgtaagcaggaactgaagcagaggtgatgatggagactctattttctgtcttgctccccaccactcaatctacttttttaaatagcacctagagacaccatcccagaggttgcaatgcccctagtgagctgggccagcccacatcaagcattaattaagacaatggcctacaaacttgcctccaggcaatctgatggatgctttttctcagttacagttcctttccctggatcactctagcttgtgtcaaggtgactgaaaaaatcaaccagaacacatctcaagagtctgaagtctcagacaaagcagtcattacactgcttgagatgtggtaattgagaaggatcattggctttgtgtttggtcctttttctttggcttagtatctgaagttccaaaagaaaaaataagagttgagaacttaagaacaaaagactgttactgcaaaaaaaattggggaaatgatgtgtcaactgtcctgtgaggctatgctggtacagaagaggaaccaacttcaaggctaagaggagacaggacacaagattcatatagcatgtgccaaccctggaatttgatggagtgactcacttgcaattccaccacagcatgaagatatttgaatcacattaaatatccctgcagagtataaggactttcagtcaacagtcactaacctgacaaacctttaacagtggcaatgggaaaagtacctcttcttatatcgcctaagagcatctttgatgtccttgttcctaagactgtaaatcaaaggattcaacatggggatcacaactgtatagaagattgatgccatcttgtcataaccctgagaaccgccagagctgggtcgcatgtagacaaagagtcctgatccaaaaaagagggtgactgctgccaggtgagaggcacaagtattgaaagccttggccctgccgtctactgagcttatcttcatgatggtgccaacgatataactgtaggatataaggatgatcaagacagatgccaccccaaaaatcactgctattacaaacttcagaacttgcaggggaaaggtttcagagcaggagagaactaataactgaggcaggtcacaaaagaagtggttgataacattcggcccacagaaacggagctgaagtatagcacacagttgtatcaatgaaccaaagagaccagtaatataggctcccaccaccaactgcacacagagggaaggggacatgatggctgtgtaaagcagaggattacaaatggcagcataacggtcataagccatggctgccagaagacagcattctgccagacccaggcttgaaaagaagaagtactgcatggtgcaccccacaaaggagatggacttgtgcttcctaaagaatcctgacagcattttaggggttgtagaggaaatgtaccagaaatctaaaaatgacaagttgctgaggaagaagtacataggtgtgtgtaggtaagggtcaatcctaatcaagatgatgaggcccaggttccacaccactgtggagagataaattcccaggaagacaacaaagagaaccagcttgatcttgggaaaatctgagaatcccacaagaatgaacttggtgatggctgtactgttcctccctcctgtcatcatcttggagccccttaaacctgcagatagatacttggattaaaaatgattgttttaacattatggatctcccttcttttgagtccagtactggatgaaaactatccacaatcaaactaactttaacaaaatcaagatataagtattagtctgaaaattactagaaaaccttctgcctaccacttcagtttgaactacattctcacaattcttcctacatatacaaacagatgttgccaaattcttgtccaaatgttgatacttatttacactggcataaagatttcatgacagtgtttttttgttattttcttgtcaacattgcatataattatttagattcaatctctgataatcttacacgtaaaatttatttcattgttttaaatttgtatttactgctcctccctttctctactagatttgtgagtgaggcttccaatcaaataatacttctgcttcactgcctcccaaacaattattttccaagtttatcattcattgccaacactaagtgcgttcagtcttttaatatatccattgattttatctattcaactccatgtgataattatggtccttgctttggtgttacactgaaaaaatatttatttatataattctataagattcttcttattgtattttcttttagttttatatttgcattaatttttggaaaaaaataacacattgtatgaagtataagtctgaggttatttggatttttttctaaatttattgacacttctcccactacaatgaattaaatgatttgcctatttatcaaaattgcctctatagtaggatcaattacataatccttactttgtttaatttttagtgatagttcatgtgccacctgttcagttccatgtcgttttataattacttctgatcatttttattagtaaggcattgagcattgtaataactggcaaacatcccttcatttttcagagatcactttgatagttcttatgttcatgccttcaaaagatctgtataatgaatccttcaaagaaaataaaattaggatccacacgactttcacttttcaatagtctagggagggataatacataaaaattcagttgataagtaaaggtatgaaaggtactaattcttaataaatattcattactgctacacttgatggaaggacctgggtctgtgagacctgctctgggttccaaggtctgtctctgtgttactctgacacctctgggattttggtttctctgcttcaaaatgaaatcattatagctcttctctttgcattaaagtgatgtttcctgtataataacaataattgcagtgggaaatcatacagcaagaactgtggtctgatagtctacagcaatagtaacatgatttcataacaaaaataggataaattaacaccctacagaaaggaaattacattgacctgtgccattcatcagagtacataacatggacacatcaaggtccatgtgcctatcttaaaaaaccctccagtaaagacagaaatagttcaagtgaattattaaagaatttttacttcaggaaattaggtgactcattgaaaatactatcactgtggtgtttctgtggtatggtttctcaagtttattttcaggacacatatgccctagagaccctgacaattgaatattatgtttaaattattaagaaatgcattcagtggacttttttcttccatatgtttaagtgagtagatcttttaaatgaaaacattaaaaacacagtttttaatctccaatgaatgtctttctgtcttcatatttaattgcctattcccttcctttgccttcctttctgagaacagactagaaagtaacaatggattgctcctcgagtgatttggagaacttatttaatcttccttctgctgtctcccaaatgataatcttattggtgccttgcagatgttagatttcaacaaacaccattgtatttgcacaacagaaaaacattttctgtgacttctacatcaagatttaacttgggttttaatattaaagaatcaaaaataaaccatttagctagtaaaatattggattttatttagaagattatgatattttattatattaagagaaaaagatcacaagcaaactaaaggacaagctctttgtcccttcaacttaagttcctcaattccttggcctgtaatcctatgaataattattattgttgctggttactttttcagaagtgtaggaatggtatttctgtattgagtaactggctgtgtgccttttttgcaaactcctaaaaattacataatttttttattttgatggtactctgaaagcattgtgtctgcaatgaatttccacagtaaaagaaaacttagaacaataaaatttatcctttttaaaagatttatttttatttgtgtgtgtgtgtgtatgtgtgtgagtatatgtgaatcttcatgtagacaggccagaagatgttgtgtcacctagagctggagttttatgcagtcggtagccacctgctgtgggttaggaagcaaactttgatttacaaagccctcttaactgccgagccctctccgggtccccaaatatgacctcagtatgctctgtttatgcctcacttgacatcatatctctgatactacatgtgattaagctgatccatctaactgactcacagtagagtgaagtagaatttattatggcattccagaatgtaaatttcatcttggataaacaacaggaaattaaaatggacaacaggaaatgaagtaaaagtaacagtgggaattagtgcagaaacagcctgttttttcaaatgccattgtgcattgctgagctatgcataatttctgtgaagtatgcaactcagcagtttcatcatcctgtgaacattgctgtgtatttacaaggacctcagtggcatgggttactacatagctagactctatgctctgtggggccatgtgaataaaacagcacaagattaagtcaagcactagagaagacaatacagtgttggtaaattcaagatgtacaaagctgctgcttggttgatgcatactgcctgcagcaaactgttctctgtaagtagaagaggacgtgctaaaatgacaagacacgacatagcatagtcgatacataacacagcagcttaactgtttatcgttatgcagtttatattctgcacattggcaccgaatacattgctgggtcagtgggttgtttaccccagcatcaccacagacaagagtaatatagtatgtcgccttgtaacattccaatggcttgtggctctaagccataggaattcttaaattccattataatattatggaatcacccttgtacattcagttagttgttttgctgaccatccttgtgggtgtcaactgtattcatgtttctgtaaatttatgtcatgtcctatacataatcattccttgactttttttttttacaaattatatataaaattttctcaattgagtgttttaaagtggagataaatgtcatgaactcacaatctgtgtcattgattcttcttccccttctagacagctagaaattggaggtgatggagaggattgcctgaaacacaggaaaacaagtagcttgcagcagtggctggtgacaagtgtttggttttctaagaacgatcattgcttaaaaaggaacggccagcaccaaattaaagcttaaagagattttcccaagcataagaacaagaacatggctttgaagaagtaagaactaagagaatacttaaagatgtaaggagacacttcttttgggggtgggggatggggtctcaccatgtagccctggctgccttgaactcacagatatctccttccctccgattccaccaagcctgacatagaagacatctgttacatcacctgtttcctcacatggctgacactctgggctctgtgatgaaggaagcacacagaaaaaggtcctggagtaaataataagaaatgatcttatacaggaaagcaataacatccgtaactaaagtgtcaagcattttttttttttttttcagtactgagggtcaagcccagggcttgcgcatgcacggtgaatgcttactacagagctgcatgtgagtgagctggacacctagaaatttttcttttttactttttttatattgaaacagggcctcactagttccccaggttgatcttgaacttgagatcctcctgtttcagcttcctgagtatctaactgagattatggtctggtgccagtattatcaaatcaaaaccctttctctgaggtacaactgtattcggtgtgatggcaaatttatcttttactgatttagctaattactgtctgttgggtcctcattttgtgatgggtaaaattcccaacaatttacatatagtatcggatttgtttctacgcagttctatgaacattgcttcctgtgagttttagatgaagaagctgagacattgggaacctgagacactgggtgtctaagtcacctcctacggtctcatagctgctgaacaacagtggttagatccagaaacttcactattctttctgctagccctagacttagcaaatagaaaatccaaaaatactgcactgattgcattcaactaattaattcctaatcagttcagctctttgttaacacagtttttagaaacgataatgagcaaaggggacagggtgatagtaaagaatattatatcaaggtttgcaaaaatattcctgactccatatttaattaactactgttgttttttctctagtgaaggaatatatttttcccagtagaaaagattcaatctctgagtgtgtctgaggcagggaagcagggtgtcagcctgggaataagaaactactggaatcaaggatgatgctaaaacagggttcaggtgatggacactagtgttactgggatgcccaggctgacctgtgctgtccctgctcctgttgaccagagctctcactcagatgtttctgatggtgtgttgttgatggctgtttgctccactgcagtgtggaaaacatagcagcacccacttcttacctcttaatctggattctgctctagatccagtgaaggtcattaacacacttgctttatgccattctccaaaggagcgttcctacaggaggctctttctcctccaaactctgctttgtccagcaagttcctggccatccatgataagagaattgcttccactcgaggttcacttaaataccctcttagacgcagagtgtaaaaactatcactaattaacagtccaagtaattgttctccagtgtgctggtaatggaaaaagtgagttttcccccagtgattttacttctacttgtggattcttcattcagaaaatgttttcttagaacaagaggacactggaataagaacatacttcatatatcttctctaattttttaaattatagatgacttttatcttttctattacctgtgggacgctgctttgtgtatattacattcagaatattatcaggtgcatttagatctttcagaaatataatcataaacattagtattcatgatttataatattctactcccaactcacttcagttagattatttttttctactggaatttaaaatggaacataagcttttgctataaaaactaatcctgaagtcaatatgcaaatatttcaatacaggaatacttgattcattattacaaacctgacttcccacatttttactttttcttaactttatagtttccaaattttacaaaattttcaatttttgcatgaatttgattaatttaattcatatactttaagcaacattcttccctgctgagagaccagacagttaactatatttttttggcttgtcatttttaactactcaatacataatttaattatggtataaagagtttcctatatactttgttattcaatccaaactatgatgctattttcaataattcttaaccactttagtatatgttatatattgtatatgaggatcatcagccaatttgggtttaatgtggtctctttctaccttgaatgtgatagccaggattcaaggctattgtgtaggttgtatgtattttaaattttgcttttattcacattgtactgaaattaattctttctatattacatctctgctaaactaccaagttcctaagaagcatagatacactgttaacctctctctctgcccactaaacattatttacttcttgttttttttttcttttttgtttctctgtgtagctttggagcctatcctggcactcactctggagaccaggctggcctcaaactcacagagatgtgcctgcctctgcctcccaagtgctgggattaaaggcgtgtgccaccaacatccagcatattatttactttttaatacaggatctcacatatccaaactggcccaagcttaatatgtagttgaagatgaacttggacttctgaccttcctgcctccatatctcaaatgctaggactgcaaacatggatcaccaagtacactttatgtgatgctaggaattgaatccaggattttgtgcatgctaagcaagcactctactggattagccatatttctatccctgaatgttgtggactttaggccctggtttgaaaaatatagtctgacattacattattaatcctctggcctactaatgaagtgtctaaataaatcgatcaagggactgacttctgggatgttgaaagttgtgaggtactttggttgactcttgatagccttgtggagaagagactcattgaaacatttctgtgcctgtagcagttgcacttgtagctacagcaacagagagactagcatctagattgtcatcagtcttaagacactggcacaaaaaaaaaaaaaaaaccttcactaaaaagtcagcacacatgagtataagtcatcccttcctggttctctccctgccaaaatgttaggtgtgctgagacctcctctccactgaacaagtacctcccttaactctcctatcttctcttatttttgtgctctgctgtggtgatatttcccataatatgagtgacactggggtctgaatttccagcttaaaaatattttcgtgattaagcaaagaaacccagtaaactacagagattataaaacacatttgttgctaagtactatcctgttaccacacagaaagctcacatgagcagatgtgaaatgtccaggtttgtggcaaatggatgtggcatgtccagcttggatccttgtctgttccattggctagtaaacattggcatagttaactataccaatgttttgtgtctcactttagtgtaaaaatgagtgcctgatagtaatgtttctctccagggattggaaggtctgaacaagcacatacaacagtgctggcatctcataaagattctgggcacattatctacttattaccaacaggcagatctgctatgtcattagtattcactgtcatgggaatatgggcagtttatggatacctttctttctaacaagttgatgtgcatctggtgccaaacattgaagcagattctaagcatctttgtggtgggagctgccagcttggcttgttgaaaaccaacagatctgggtaataatgcagtgagctaaaatggatttgaagagatttgtgcattcagtttctcaggttcaatgagggcaatgaggtggtggccccaggaaggtcatgtgcacacactgtggttcagtgtcactgaggattggtggcctgaagatattccaagatctgacaaggtgctgctggcagcctgcccaccttctcctccagagagacatattattatctcagaatacaggcgaatgctttccatgtggtgaaggacatgttctatttccattttactggcttttccagacctagagatttctccaacactacacagtcatttggatataaagaagaaactgattatctgaaaaatgagctaaatgaatttaataaaactactgaatcataatagttaacttcttgtctttggcatcaaaaaatgtattttctgatgttaagattctcttgttgaaaaaaaatacatttaggtgtcttccacacaagcagaccctactcaatatttgagctactttaagttatcgttaatcttgaaggcaaaatgtgctgttttcagttgtaatttgaacttacttaatcactttgactttaagccttttcattttctttttcataattgttatatgaattttgtaattatctggctatttcctaggtaagcacatgaaacttccatcaaatgttaatctaggaagatgtcacctgtctgctgtctggcatctgcaaggccctgagttcagttcccaccaacacacatgcatgcacgcgcgcgcgcacacacacacacacacacacacacacacaccatgtatacattcatacgcatgcactcaccaaggcatacagagatgtgtggacacccatgcatgcacgcacgtgcacatacacaataaccctttttcagtgatttctggcttcatttcccttaaactgattctttgtcatataacttcatttaggttatccactgaagatatgtaaagccaccagagcttcaacttactttcctttgttacttagtccactgatttcaagcttgctatctttgtctgaatttacaaatcacatttgttcccaactgggattgtcatgtaattcaatcttgtttgtaattcaaataaaaaatttaaaaaatcacatttgtttatactttatgagcttctgtagtggtttacatcttccacaggttcatgtgtttaaacatcttatacccagatgagggtactctttggggaatttgtagaactttgggttgagatctagctagaggacatgtgcctttggagggcaagctttgaatttatatcctgcccctctctgcttcttggctgcattgtactcttgctactatagccatgagttgccccaactgccccactgctgtgccttccccatcttgaaggactattttccaaaaggaaacttttcctacattaagctatttctaaattgtgccataatgacaagaaaggtaatacagacacattcattgactttattcatgtatttttgctactatatactatagctgaaatatattttattcatttttgatctataaaacagcagtatttcacttatgtgaattaaacacaaatatttatatgttctgaaattgttacccgatatccaggtcatgttgcataatcttttccaattaatgtgtggaatggtaataaatttcccttatttaagttattcttatatgaactaaatctttttctgaagtaaatttttgtttcattgttacttttttctcaatatttgtacccttgcatgctattggattgaattgcttgaattgaaaatttcatgttaacaacatttttcaaaaatactctttcttgtgaagctttattctctcatttttaacaagagcacattttacaaagtttttcccaatactgtgcatcctttccgcaaagtccatttgaaatttggatttgaattaattttagcaaactgaatagttaaaaaggcaagttttttgcattctttcaaatcaagaaattatcattccttaaaattcaatatactgttgcctccatctgttcagatacttattcctgactatattacaacatactgaatctccatagcaattctttgaaccttcctattggccccatcccactcacctctttatgttcatccatattcttaaaatctcccagtggctttaattcaacgtttacttttccaaatcacccaatttgctgttctcggctttggtgactgtaaaattcttggattgcagatgcctatctccctgcacaccaactactaatcccctgaagacatctttgtgtaatcttcataatccataagacactgagagaccctttgaaaaatcccactttcgtccttaatcttctgccttaaagggctgaaaataaaatgctagagtacttctataaagcggaatattagactgcatcacaccattttacaaatttagaatattaaattaatgttctgtgcagaattgggaatgtaccaaccatgaagggttctagaaaactccaaccgtcttctacaaacacagatgagaaaacatggcttctgaggatgtgagatcattctctgcaaagcccagataattcttttcccagccacagtgcaaagttctgggagaatcctggaaacaacggaaacatttgatgatagaattacagagcttgagagatgggtcagctgttaaaagtactaaaagctcttgcagaagacccaggtttaattcctagcacccatcaagcacctgtacatactgccacatacacacaaaaatgaatttaacttttgaaaaatgtattcttctcaaatgatacatcccaataatattttcctccctccccttctcctaattacctccccctattttccgtctcccccaaatacactcttctccatttgccttcagaagacagcaagcctcccagggatatccactcaacacagcataacaagatacagtaaatcaaggctggacaaggtaacccagtaggagtaaaagagttcaaaagcaggcaaaagagtcagaaacaccccatccccactgttaggagtcccacaaaatcaccaatcaaacaaccataacatgtatgcagagggccttggggcagacccatgcaagctctgtgggtacattgctgcttcagtctctgagagctcctatgagcccagcttagttgattctgtgcgctgtgttctcctagagtcatcaacacctctggcttctacaattactcttctaattctttcatggtgttccccaagttcaaaagtgagggaccccaaggagatctcaaatttgggctctctttccacctaatgtttggctgtgggcttctgcatctgctcccatcaactgctggaggaagcctctctgatgatgattgagctaggcactgatctatgagtatagcagaattactattacgaatcattttattgattttttttctatcctaggtctctgggctatgcagcccccggtccttggtcatgcaagcagtatcacacatggacttcctttattggtgtgaacctcatattagtccagtcattgactgaccattcccacaagttatgcaacttaatggcctgagaacatcttgcagacaagatagattgtaggtaaaaggttttgtggctggggtggtatcccagtcccaccactggaacttgcctggttgcagaaaatggccagttcaggtcccttatccccccattactaggagtactctctacgatcacctttgtagaatcctaggagtttctaatgcactagattaccacattatcccccacatgccccccaatcacagtcacctctccttacactatctccctccattcctgcccccaacctgaaaccttctattcccatccccacccaaccccagtccacctacaaaatctaatctatttcgacttcccagggagatccacaggtctcacttagaggccgccttgttaattagccttttggggtatgtgggttgtagcatgattatcatttacttaacagctaatatttacttataaatgagtacataacatgcttgtatttctggggctgggttttacctcactcaggatgattttttctagttccatgcatttgcctacaaacttcatggtgtcattttttaaaacaactgtatatgtatcacatttctctattcatttttactgagggacatcaatgttgttttcagtgtctggctattatgaataaagctggtgtgaacataactgagcaagtgtatttgtgggtaggatggagcatttgaggatatatgttcaagagtggtatagatggatcttgaggtagattgattccaagttttctgaggaaccatcatattgatttccacagtagttgtacaagtttgaacttcaagaaatggaggagtgttcctcttacttcatggatgtaaaatggaatctcagagtagtttttgtattttgtatttgtattttcctaattattattggtgttgagaatttctttgttttttttctgccatttgagtttcctctaagaattgtctatttagatctatacccattcaattgcattgtttggtttgttgatgtatagtttcttgaattccttatatattttggatatatggatgtagagttggtaaaaaaaatcttttcccattctgtaggctgccattttgtcttattgatggtgtcctttgcctcacagaagtgtttcagttttgtgaggtaccattcattagttgttgatcttagtgtctgagctttcagtgttctgttcaggaagttgtctcctgtacaaatgtgttcaatgcttctccatactttctcttctatcaggttccctatatctggttttatgttgatatctttgattcacctggatttaaattttgtgcagggtgatatatatggatctagttgtttgcttttacatgcagacatccagttaaaccagaaacatttgctgaatatgccttctctttttccattgtgtctttctggtttctttgtaaaatatcaagtgtccatagacacgtgaatttacatgtgggtcttcagttcaattccattgatcaacatgtctgtttttaggctaatacaatgagatttttacaaccatggctctgaagtacagcttgaaatcagggatggtgatatctccataaattcttttactgttcaggtttgttttagctatcctgggttttttttccatatggaaattgagtattgtcctttcaagatctgtaaagaattacattggaattttgatagggattgagttgaatcttcagattgcttttatgcagagaaggaggagtaatgagcaaaggggtcaagaccaatgctggtgaaacccacagaaacagctgacctgaacaaggggaagctcttggcccccagaccaatcacttggaaaccagcatggaacttatccagaccccaagtgggtgtcagtgaggagacctcggaaatctatggcgccttttatagtagatcagtacttatccatagcatagggatggactttgggagcccattttacatagagggatactccctcagcctagacacaagaggtagggcctaggccctatcccaaaggatatgacagactctgaagatcccccctccaatggaaggcctcactctccctggggagcagaaatggtattggataggtagggtgttagtggggggcaggggagggaggggaggtacagggaatggggatttcaatgtaaaacaatcttatttctaattcaaatttaaaatgttaaatttaaaaaaaagttaaattaaaaaaaagaaagaaaaagtttccagattgtttttggagtatgggtagttttttattatgttgatcctagcattctatgaacatgggagattgttccatcttttgatatcctcttcaatttctttcttcaaagacttgaagttttaccatacaaatcattcacttgcttggttagttactccaaaatattttatattatttgtggctattgtgaagggtgttgtttcaccaaatatctttcttgatctgtttgtcatttgtatatgggggtgtcaatgctgattttttaagttaatcttatatccagttactttgctgaaagtgtttttaatgtaggagttttctggtagatttttgggggtcactaatacataccgcaaataactatatgttgacttcttcatttctactttgtatccccttgatctccctcagttgctctgattagaatttcatgtactatattgaatagatttggagagagtggaaaactttgtcttattgttgactttagtggaattgctttgagtttctctccatttaacttgatgttggctataagcttgctgtaaattgtctttactatgtaaaggtatgttccttgtatccctactctcttatcatgaaggggtattgaatcttgtcaaaggctttttagacatataataagattatcatgtggattttcctttattatatgacagattacattgattatttttgcatgttcaactatcctgcactctgggataaagcctacttggtcatggtggatgatgtttctgatgtgttcttggatttagtttgttagtattttatttaaattagaaacaagcttgttttccatgtcaatcccagttccctctccctcccctgcccccccactaaccccctatcccaacccctttctgctccccaggggttttgtgaatattttattgagtattttgcatctatattcataagggaaattgatttgtaattctcattttttgagtctatatgtgggttgggtatcagggtgatggcagcctcataaaaagaatttggcaatgttccttttgttcctagagtgtggaaaaatttaaggagtattagcatcagctcttctttgaaagtctggtagaattctgcactaaaactgtctcgccctggactttttgaagttgggaacttttaatgactgcttctatttccttaggggctataggtctatttaagttgtttgtctggtattgttttaactttggtaagtagtatctattgagaaaattatcattttttttagatgttccattttttggactataggtttttgaagtataacctaatgatttttttggatttcctaggttctgctgcctggaggaccagccacaagtagcagcagggctcaaagggaagccacagagttggtgcatactaagactcttttatctcaggggataagggaaaaagatactcacacactctattgatggcttctgtcagaccttttctttattcatcttttgcattctctctatttttattttcctggtgatttccttccctcattcttgatactttccttttaactctacttttattcttgttgtttcccttctaacagtcattatggatatttttctcctaactctctcattctaggtgttttccttctaggccattttatctctatgtttattttttcttacagcttatataccccagcaaaatctttcaggcaataaaaaattacaaatgtggttacattctgtttttcaagtgaatgattacaatgaatacaaaacaaacagtaaaaaaaaaaacagcatgttttccatatcccttacacaattaaacattttacatattacaggtgaaaaacaaattatcccaagaacacaagtacattcatacccaagcaacttgttacagattaacctgtaggcaagcaagatgttcttctcagttaggtcttttactggcaggatgccttttgcagttacaaagaaagagccagttacctcattacttattttgaaagtttatcttataaggagtcttaaaggaatcacaaacctaaacttttatatatgaaaaaaatcagtgagctctacctgaaacctttagagtgcataccctcccatcatgtatatagatatagatatagatatagatatagatatagatatatagatatatagatatatagatatatagatatatagatatatagatatagatatatatcaggagactggatgcagaaatggatacaaggaattaactattgcctttgatcatcaatcaaccctagcaaggaaagtacgtcagctagtaacaattgggctgctttgtattttttacttcagctatgcgttcttgtgaacttcagattgttttctgtttttttttttcatctcaaaactattaacaaaacatctaatctagtctaaagttattttaaggtcttatttcagttaatatgcacaccaagatctgtgactgcctctttcaacattaagattaatagaatttaagctagctgggctagtgggactcaatcttaatcattaacttaaagtcatagtctatatggctcctcaatagaaacttgtatgttctagctgtgtgacatttccttgttttatattgtatcataaaagctccatttaaactaacattattaccagtcagatagtacagtttaggaagaattcatcttcataataatacacaggtaaaactgcccagtagaatgagaatgtttccatgagataaatacactatattacagtggagatcttcccacacaattcacaccatgccagataccatagaaagatggcagcagcaaacatgtaaaagcacagcagaagcaaaggacattcaggagtctgtgctctccaggccgtccctatgcaagattcacccatcagggagttgccttctgatgggctgacaccttgaactgcaattgccatctactgcttctctgacatggcccccagcaaatagatatttgttgttatgtcccccttcttgtttctgattttgttcatttgaatattctctgtatgtctgttagttagtttgtataagaattagtctatcttattgattttctcaaagaaccaactatttgtttaattgattctttatattgttctctttgattctgttttattgatttcagccctcagttttattattccctgctatctactcctcttgggtgtgcttctttttgttctagacatttcaggtttgctgttaagttgctagtatgagatctctccattttttaaaaaaaatgtaaacacctagttttatggacttttcttttacaccactttcattgtgtctcataaatttgcgtatcttgagcattcatttttattgaattctagaaaatctttaatttcattttttatttctgccttaacccaacagttattcagtagagagttgttcagtttccatgagtttgtagactttctgttgttcctgtcattgttgaactccagctttaatctgtagttgtctgataggatacagggagttatttcaaattttttgtatctgttgagactttctttgtgaccaagtatgtggtcaattttgcagaaattttgatgaggtgctgagaaggtatattctcagtgtttggatgaaatgttctatagatatttattaggtcttgtttataatatctgctagttccaatatttctctgttcagtttttgcctagatgacctgtccattggtgtgagtggcatattcaagtttcccattatcaatttgtgaagataaatgtattatttcagctttagtaatgtttcttattttgtttttcaaacatggatgcccttgtgttttggacattgatgttaagaattgaaagttcattttggttgatttttccctcaataagtatgaagcatccttccctgtctcttttgattaatattggtttgaagttcattttgttagatataagaatggcaacaccagcttatttcttaggtccatttgcttggaaaatctttttccaaccctttgctctgaggtaatatcaatttttaggtatgtttcttgtatgcagcaaaaggatggatccttttttcacatcctactgttagtctgtgtctttttattgggggattgagaccattgataccagagagatatcaatgagtaatgattgttaattcctgttattctgttattggtggtggtggaagtggtgatggtgatggtctctctgtctctctgtctctgtctctgtctctgtctctctctgtctctctctctctctctccctctctccctctttctctctctctctcactctgtctctctgtctctgtgtgtgcatgcacacatgcacttcccttctcttggtttttctggtgtgagattgtttatttcttgtgttttcaccggtgtagttaacctccttgggtgaagttttacttctcgcaccttctgtagggctagatttgtagagagatgtttaaatttgagtttattgtgaaatgtctttttttcacctatggttatggaatgttttgctgggtatagtagtctgagctggcatctgttgtctctgagatacttcagaatatccctccatgcctttctggattttagtctcctttgagaagttgtgtataattttaatagctctgactttatatgatacttgctctttttccattgcagcttttaatattctatctttgctctgtatgttgagcattttgattattatgtggtgaggggtctttcttttctggtccaatctgcctggtattctgtaaacttcttgcccctttctttatagacatctcctttgcaaaaaaaatcttagggataactattggttttaccaccagcagctccataaactgcccaagcccctcccaactgtcacccacattccccagctgttcataagtgtgtgggttgatatcagggtctttgattcgattccattggtctacctgtctgttttttgccagaaccaagctgttttcattattatagctctataagtagagcttgaagtcaaggatagtggtctctccagaagttccttaattgtacaggattattttggctatcctgggtttttgtttttccatataaatttgagtattgttctttcaaggtctgtaaagaattgtgctggaattttgatggggattgcattgaatcttttttgataagattaccatttttactatgttgatcctacctatccaagagcatgggagatctttccattttctgatatcttccttaatttctttctttaaagacttaaagttcctgacatataaatccttcacttgtttggttagagttatcccaagatattttacactgtttgtggctattgtaaaatgtgatgtttctctgatttctttctcagcccagttatcatctgtatacaggagggctactgacttttttgagttaatcttgtatcctgccacattgctgaaggtgtttatcagctataggggttccttagtagaattgtttgggtcacttatgtaaaatattatagcatctgcaaatagtgtaagtttgacttcttcctttccaatttgtatccccttgatcttttttgttgtcttattgctctagctagaacttcaagtacaatattgagtaggtatgtacagagtggaaagccttgtactgttcctgattttagtggaattgctttgactttctttccatttagcttgaagatggctattggtggctgtatattgcctttattatgtttaggtatgttcctgttatccctgatctctccaagaccttatcatgaaggggtattggattttatcaaaggctttttcagcatttaatgagatgatcatgtgttctttttcacttttttgtattgtgtattatattaggtcatactttaaaaacctgtactccacaaaattggaaaatttaaatgaaatgaacaagtttctggataggtatcacataccaaatttaaatcaagaacagataaacaacttaaacaaatctataacccttaaggaaatagaagcagtcatcaaaggtctcccaaccaaaaaaataagcccagggccatatagtttcagtacagaattcaaccagaaagtcgagaagagctaatactaatactcctcaaactgtttcacacaataaaaacagaagggccactgctacacactttttacaaggctatagttaccctggtacccaaaccacacaaagatgctactaagaaaaataattacaaaccaatctccctcatgaacattgatgcaaaaatactcaataaaatactggaaatagaatccaagaatatatcagaaaaatcatccaccattttcaggtaggcatatcctcttttaggaaaattttcttatatgactttgttgaaaatattttctgggtctttgtgctgggaatcgtttccttctatttttgttagttgttggtttggtactttaatactgtcccagattttctggatgatttgtgtcttttttcttagatttaacattttcaatcgtatcttcaatgcctaagattctttcttccatctgtttttttctgttggtgatgcttgcagctgtggttcctattctcttaactagattcttcatttcaagaattccctcggtttgttttccttattgcttctatttctattttcatgtcttaaacagttttgtttgtttttttcaactgtttttattttactggatttattcacttcttctttaagaacctctaccattttcataaagtaggatttagggtcttttgcttgtgctgcagctatgttggaatattcagggcctgatgtggtacagtagctgggctctgttagtgacatgttgccctggctgttgttgattttgtctaggcctctgggtttggggtgattataggtttaggtaccaatttctgagtttgtctttgttggcttggtgatttgttgcttggtttctgtttcctttctggtcttctggctggtatggcctgtggttgagctgggagtcatgaattatggatttctagtggttaacattgcctctctttgagcaaggggtctctgctcatgctggagcctgagacatagagatgaggagaagaggaaggatacaggataaggttagcagacacccagagagtgggggatgtctgtaagcatgaggactacctggtggctggcatggcctctggttcaacaggggcctccaccaaaaataaatcttaaaaatagagagagaattaagagctgcaggtaaattcccttaatgcagcatattaagtacatttatttctttgaaaactaccaagaccagaaagatgttgatcacaagaaattattttattcacacaggtttttcaaattcatacacaaaacttgcacactattcactgtgtcctatagatgatttgaatatgaaatcaaagtggattttgttcctttatagaattgaattttacacaatgaagcatttttgctgataaggtcaggaccttgactacaagcagtacttctgtacatacatcttaatactattatatgatgacagtaaaaacattgacaatccaatcaagtaaaaggaatggcacatacacatatttcttttctcaaccacagaacatatgtgagttaatatcctcaacttcaaactggagtaagtgaaaagcatggatggaacaatattagatgttagtgtttattaaggagacaaatgagatctgggttaaggactccaactctaacttccctcagcaaaatcctgtccagtaacattgtcagctgtcccttccacattcacactattggaagtgggattctattccagaagcatagtgtgtcaggtcatgacctctaacacttttctgggagcttttaccacatgaatacttgaggacctttagaattttccattcggagcacagaagtcccacgagtgtccagaacaacttctgatagaaccaatcccttggaaacttccccaatttcttttcacctgagattaaggaagtcagaatcttggttggagataaacagcaggggcatgtttttttctccagtgtcctttcctcagcatttgaaatatcaactctccaccattcccacaaaggctccaagggaaatggctaaattaagattttctgacggggctgcagtgatggattagtggttaaaacaccttattgccattacaaaagacccaggttcaattcttagcacccacatggtagcttacaaccatgcgtaatttcagttccaggggatctgatgctcccttctgaccttcataggtaccagacatacatgcaaactaaacccttatacacacaaaggaaaaagaacaaatcttaaaaaaaatacttacaaatattttctttaaaaatatatgtgtgtggatacatacatatacatatatttagtttttatgtttatggatgtgtgcctgcatgtgtgtctgtgaagtttgtgtgtctggtacctgcagaagagggtgttagatcccctaggactagagttacagaggtgatgagataacctgtcggtgttgagaagtgctcttaagcactaagtctgtcctctgaaagtgctctaaatcactaagtcatctcttcagaccctaaactataatttacttatgctttcacaagtccagtttcttgtcacatttaccaacaaattccaattttaattagtagcatacatcttcctaatacaaatatgctttatgaaataagctttaaaaatgtaacatatgggcacgcagaagttgccaaaatcaggatataatcacctcaccaacagagagctcatgtctgattcccaatttgttgttacataagatagagaacaataagtgactctaccccaataacatgacttcccagcaaactagacaataaaacttaaacatgacagatgtattagacatctctgccacaacaagtttctgtctatgtgatgttaacaaacccattatctgtatggttaattatatgttgagtaaatctataagggaaaaaatcaactcaagatttctagaggtaaatggactttgggagcccattccctatggagggatactattgcagcccagatgcaaggaagagggcccaggctctcctccaaatgatgtgacagactttaatgatccttatggaaggcctcactatcgttagggagtggatggaggatgggttgggggatcagtggggtgtactggaggaagggaaggtgagggaatgggggattgatatgtaaaataagattgtttctaaaataaaaatgaaaaagaagatttctagaggtaaaagaacaagttcaatatgagaactaatttgggaaaatcaaatgtttgaaatgataaatatatttaacataaatatacagcacataataaatttatgtgtaaggacagtacccctttaatacgtacattttgtgttaatgtatcttttaaaacaacacaaaataaagaagttggctggagataaggcccagagagtgcttgcagtgtaagcatgaggacctgagtttagatccatagcacgcacataaaactaagcattgggatccacatctgtaacaccagcactgaggacagaggctggagacagaaggatctgggagcttactggccaggaagtcttatggaaactgtgagttctgggttcagtaagagaccttgtctcaataggtagaacaaggaaaatactagagtcaacctctggcatacacacatacatgtacagtcaaggactccagcacatgtgtgagcatataagcatcaggacaccatgaacacacacacaataagtaaaaatgttattttaaaaaatatcttctaaggccgggcagtggtggcacacgcctttaatcccagcacttgggaggcagaggcaggtggatctctgtgagttcgagaccagcctggtctacaagagctagttccaggacagcctccaaagccacagagaaatcctgtcttgaaaaacaaaaaaacaaaaaaaaatctagttacttatggtaattcctctcctagacagattgggatacctgctgcctcctggtcttgttggtctcttggcaacattgactagtactggcatctatggccattgtagtgataggatgttcaacatgaagtttcattctgtcacaactagataatgaaatacttgttgactactttagcttattggtggttttgtttcttggatttgtgtgtttgcttgttttgatcgcaactgtatactgatcttctattttcttggttttgtacttgtcctgttttgtagtagacatgtagagcaactatatatttacaataaattctgtaactagtaacatcaggaaaagagcctcttattccatctgtttagagaatctttgatttctttgttcctcaggctatagatcaatgggtttagcatagggattataatggtatataagacagatgccaacttgttttggctcaggtaatctcctgagttaggatacatatagacaaagatacctgagccaaagaaaagggtcaccgttgtcagatgagaagcacaggtgttgaaggcctttgatctgccctcagctgatgtgatcttaagaatagtaacaatgatgtaaccataggacaccatgataaccaagacagatgtgagtccaaagatcactgtgagcacagggtccatgactttaaagaaaaaggtatcagagcaagagagggtcagaagctggggcaggtcacagaagaaatggttgatgacatttgacccacagaaatgaagctgaagcaaggcacacagttggataaatgagccaaagaatccactgatacaacatcctgccaccatctgcacacagagggcaggggacatgatggctgtgtagagcagaggattacaaatggcagcatagcggtcataagccatggctgccagaagacagcattctgccagacccaggcttgagaagaagaagtactgcatggtacactccacaaaggagatggatttgtgcttcctgaagaagtctagaagcatcctgggggtaatagtggaaacatagcagatgtccagaaaggacaggttgctgaggaaaaagtacataggtgtgtgtagatgggtgtccaatttgatgagagtgatgaggcacacattccaggacagtgtcatgagatagattcctaagaatattgagaagagagcaatggtgaactttggaaactcggagaatcccaataggatgaacttcacaattgtgctgttctttcccctcatcattgccttgatggttctgggtcctgtcaggaaaaagagaataggtctctaggtcaattgtacttccagcttctatgaaaacaagcttttagccacacataacacataacccaagggaatattgagtcatttttagagaagtaaccccacttgactttacctcttgtgtcagttttcctaaatgtaagatagttgcactttttgttattgacccagcaggctctcatgaatgcaaaaaaacatctggggctgagaaagtggctcagctgttgagtacttgttgctcttgtagaggacctgggttcccagtactcacacctggtagctcaaaattatttgttacttcagtttcaagggatcatatctctccttctggtctcctttggcacccacagactttgatacatgcacaaagacacagtaaaaataaaataaatattttttagtttttgttgttgctgtctctagctgggtgtctctggctgtcctggaactcactatgtagactaggctggccttaaactaacagagatccacctgttattgcctcccaagtgctgagactgaaggcatgtgccactacacccagctgaaataaatcttttaaaaaaatacatcatctggaaatactatttaaaaagatactttggaaaattcagaatgtgattggtggaataactgataacatgaatttagatgtcagataaccattactgggatgtggttcttctgtgtaagccataccactctgaaagaccatcttacattgtgcatacatcattttatctgcaaatacgacactagaactcatctcacagagtttgagattaaatcagtttagatatacaaagtagcctactggaacataacaggtaatgtatgaagtggtgttgttaggaaattgtttccaataattttaaagcatacctttggtttgtaaacagcatttaagtttaagtgtttggggctgagggcaaggctcagtcagtaaggtgtctgcagcataagaatgaggatctgagtttgatcctcagcattcatatacaagctagacatagtggtacatgcctgtaattccactgctggggaagataggaggagacaggcagatcctcagagcccacagtctagccactctagctaattggcgtgttatatactcagggagagaatgaaaaaaaaaaacacaatggagaatgatagtagaagatactcaagtaaacctctggtctctacatgcaaccaaacgtgtatacaaatgtgcatactcagatataccacacacacaaacacacactaataataataataataagaagaagaagaagaagaataagaataaataagaatataagcaagatggtaatagcacactccttttttaatttaaaaattttattttttattttgcataccaaccccagttcccactctccccttctcccacctcctccatctcccacccttttcacccccctatccacttctcagaggaggtaaggtcttccttgggagtcaacaaaatctggcataccaagttgaggcaggacaaagcccatgacccccactttaccccctcaccctgtatcaaggctgaacatggtatcccaccatacggaatgggctccaaaaagctagttcatagccctgggataggtcctggtgccactgccagactcctctcccaacatatccagtcacataactgtcatccacattcagagggtctagttcggttccgtgaaggttccccagctgtcagtccatagtctgtgagctccctctagctcaggtcagctgtctctgtgtttcccccatcatggtcttgacttccctcattcatatgacccttcctccctctcttcaaatgaactccaggagctcaacccaggattgcatactcctttaatctcacctcaggaggcagacataggcagatatgtatgaggccagcctggtcgctagagcaagttccaggacaaccaaggctacacagagaaacgctttctcaaaaaaccaaaatagtaataataataataataataataataatataaaaataattttaatttaatttaagagtttaaagaaaatatagataagtaatgtagactacaaatagctaaattataaatcaatcacaaggtaatgaaaaaactattatacttgaaattgattatttttaaacacttttaggcatgatcagatataacccaagctggccttgaacttgttatgcagctgaggatgactttgaacatttgatctatcactctccatctcttaagaactgggatgacaggtgtactactaagtatatataggtagaataaactctatctttcacagattgagaccaaatatagcttcttctataacttcaatctcattaggcatcccaaaccatagtagttcagtgcttcaagctcaatagcagcttctgcagaaacaaactaccttcttgtctatcaatttggaacaattgtttccatcaacggtgccagtgttctgccttcaagtacttggcaagtttttcaaaggaagataccaatccttatcttggtggcatattgcctggggagtgttaagaactcttcattttgtgtggcatatataatacttcagaattagaagaaagctaggtggtataagccagcaatgtacatccttaaagctattatgatgatgaagagagttcactgagcaatctcaagggctcagctcctctcacctctacctctcagttccaattctgggcctgggaaagggcctccttggctgtccgccctctcctttctgcttctatacatatgacttctctgctcactgttgatggatttaggttgatggatttaggtttgcccctaattctgactattgtgaataagttttctgtgaacatttgtggaaatgtccttacatagatgcacaattttattcctcttggataaataatctgtagttgaattacagaagtttttacttgtttgcttctagtaaacaggtgtgaagaggaagcgaagatggttcagtgagaggaatgtctccagcacaagcatgaaggcctgaattcagagtacaacacacacatgcaaagctgagcacagtggcacagatcagtaacgcaagcactgaagggagggtggagggaggtggattgtcacagctcactggatagctagcctaattggtgaactgtaggttctgtaagagatcttgtctcaaaactaatgaataaagtaacaaaaaaaatagtactctgagctgacctttggtttccacatgtgtgcatttgaacaggtataactgcatacaataagtgcatctgcagacaaatgcacgaacacacatgaacatattttaccacacacacacacacatacaaggaaaacactcaaagcttcattggtggctataccttttcagccagcttcagtaagtaataattcacatattaaataatttgcatggctgtaagaaactgccctcaatagctttgaaaactccaacttttgcaaataggaaagcaatgacaatctttcatttcctcaaagaggaaaaaaacctgtaaagaactacacaataactactagaaaaagaagctatcaacttgagagagggatgattgagagggtttcagagaggatagataggaggggctggatggagaaagcgagggggaaagtgatttaatttttttctttaaaaatgtatttttaattttacataccaaccccagttccccctccttccctttctctagccaccacctcctcccttcccaccatgaatccactcctcagtgggggtacagccttccttggggagtcaacaaagtctggtataccaagttgaggcaggaccacacctctcctcaccagtattaaggctgagcaaggcatcccaccacagggagtgggctccaaacagccagttcatgcccctgagataggtcctggtcccactgcaagcactaatagatcaagccacataactgtcactcacattcagagggcctagtttggtcccatacaggtgcctcagctaaatttaaaacttacccaccaaggaatctaggacctccaaatgaataggatggataggcataggaactcacggagcctgagcatcatgatcagggcctgcaccagtccacacctgatggggtcctagagctgaaaagtggatacgtgcccccatccctaacacagaagtgatctccaaatgacagtcactttcaaataaaaatttagtttgctccaagggagtctcagtggagaaacaaggtcacatgcccagcagtagatggccaacaggaaatgaactcagtggcatctttggaggttccttgtctcttaatgtcacatcagaccttttttgctttgtcttattttactcttttttgacttttttgttctctcctatttatatatttttaagtttttctctttttatcatttaggtcctttgcatgtataatcggctcccagtgtagtgtttttatgggattcctgggtgtacagaccagaggagctctgtttctcatgccatctcttgggctcctttccttctgtttgtttgtttgttttttcctattccaatgagttagtttttgttttatcctatttcacttcattttgtttcattagaagcttgtttgttttctagtaagagacaaaaatggggtggatctggatgcaagaggagatagggaggagctaggaggagtaaagggaagagaaaccataatcaggaaataatatgtgagaaaaaaatctattttcaatagaagaaataataatataaaatttacattccttacagataattttcagggataccattatagtccactattattttgtattttacagtaggaatctaaataaatcaatacttccttttagaaataaaacttattaaagaaacagaacaagttacatttagaaataaatgcatgcatatatagaaatatatgtatgtaataacagtttttaataagcttgaaggacagcagggagaggtatatgggagggtttggaggaagaaaatgaaagagaaaacttttgcaattacagtataatctcaattctcccttaagatcttagtgatttctttatctcccttgcaagaggattgccatagttactgtcattgccatttagcaatggccttcctggtagccagaggaaagattttaaaattcagtaataatgaaaatactaacaggtttattataataatgcatgtggaggtgtcctccgtgctaattagttctaaataatactcaaagcaactgtgtgtttaaattggttatggaaccaccttctaccatgcgggtatgtatttgaatatcctgatggcatacatataaaagacattctggaacacgagtgtcattctcgggtaatatgtgcttttactcatctatagctgtgattacaattctgagaatacacaatttgttctcagaaaaatagtgtttttaatagtcctgactttatattctaattgtttcacaacaaattcactgacaatgttttccaagatgctgcttaaatgtctaaatctatttatcatgtggaactgtctcaaaaaagttataggcatataaataaagtatcagaaaaccaaaaaaatataatctcaaaagtaagagaaaaacactaggactaatcactgtgctacatgcctgaatatttatattgaaggtccagaagaacatggtagtcactcattagactgcatgagagtttaactaaagcagtatacactaaaatgaaccctaggaactgatttaatacctgagtctcagaaaatggaactttgtgtaatcacaaatataaatgttgtccagaactgtactgataaacagtgagaaatacctgaggagacacaaaatcacaagactctatgaaaatatcaaggagttacattaattcatttggtgactgtttcatattaggcaaaggtgttcagtgctctcaataaataaaaaggaaatagtaaattgtatactaaggagcaggtcatgtttgaggacactttttgccacctctggtactcttatctgatttcatcatgtttggatgcctcttttgcttcatctattaataaagaataatcaaaactcttgagcttttataaaaacttgaagtgtatgcagagagcacaaagtaacaagttggctctcagaagtgggtatttctacattaatatgaatgacaatgaatatagattgctagctacattaataggggaaactgagatgacttggtatcaaaaacagtcagtcctgtcatcaaagtggtagactacgtgaaaacttccctgttccccatttctcactttcccacagactgatgtttgaaattctatgttagacagtttttaggggaatcacatcttttgttgaaattaatgttatcccataggtttcttgaaaaagaggaggaagagacatgaaaactagctgcctggtgtctttgagtaaagagcataagagagcagggttacaggaagaaggaaaaatagaccccaaagcctttagcaacagaaaacacattgcccctattcagattgtactcacagatatctcgggagtgtgtagccccttacaggtgtgctttagtgagatcgtggatacagtgtgattgatcccttcctcctgggcagtgctctagtctctgcatgtgtgtaaaggtctctcaaaaattagaaaccaacatcataatgaatgctcgacattccctgggttctgtgttttgggccgtggttcttcctggtcattgctgcaaggaagttgattccaactacagtgtctcttaaatttccttagggtacagtatggaggagggaaaagcaattagcagatacttcctatttctgttaattattctcaagagtggtggatggagaaaagagttaaatgttcccccaccgattccatttctccacacactcagaggtccctggtgacctaatgtaatcaaattccaattttcccttccacacttttgaattagggatacagaggagtctttgaaggcagggtgaccctataacttatcaaaataggacaatctaggcatgaatctggagattattgataatgtgtcaacacggaaaacataaaagggggttgtcataagcagtgcagatgactcatccctcaacactgtatgtctttttataaagagaatttttttatgtgtatgtgtatatatgccacacaaatgcaggttctagaaaaaaacctgatgagggcatcaaatccctggagttggagttacaggtgctcgtgaatagccttacatgggtgctaggaaccaaacttgagtcctgtgtaatagcagagagagatcttaaccaacaagccatctctccaggcccagtgttctgacttctattcctttatcaaaactgacacacaccgaattttggtggtcacatgatcaggctcttgttgtacttgtttctggttgaattctgacttcagcatttacaagctatgtaacttcaatcactttatttactctcactatatcaattacttaatcagcaaaatggttgtggtagataatacctcctcaataaagcggcagtgaatttattatgatagtgtctgataatgcctgggaacactcaactaatgttagcaaatttatatcgaatcaatatgccattgttttagttttccatattttctggccctattttttatgaacagttataatgcttttactatttacatttccactaacatgtgataattacacacatcaatagagcatggtatggtgttttagcacagatattatggtttggatttgaagtattcccaaatgctcatgtgttcaaaggttgatcccagagttcacgggactggtctctgggaagtgatgggacaacccatcaatgggtccatggttgaacagctattagaaactggtggagaatgtacgtggtagcatcaaattaggggaaggggagaccaagaggtgtgcccaggatgagtctaccctgccccctccttcctttttcctgtgacctaggtacctttttctattttgtgctctcttccaagattttctgtcttatgacgacccaaaacaaaagatccaagtgactgtgaattgaaatctctcaaaccaggagccaaacaaaaactttcttcctttaaattggttttgtcacaatgatggaaaccacctaattttgtggaatacacaaaaatatagtgattatttctgtctccttgtttcttctttttggaaccttccagattcttttttttgaaagctgtagagtcacacttgaagaactaggtagttaaattgatattaattgattaatatttttaaggaaagaacacatggagacacctgagatgatggaaactattcagaggaacaaataaaacatctagaagagacataaaagcattatgactaaagctttaaattccttgggtaagtcagacagccagctggaagagatccatgaaaataacgggagttttaatgatatgtaggatacagtgagaagattcaacaaacatctaactgagactccagtaacatgacagaaattcacaggaattttgcagaatacttataccgtacttgttaaacactgcacatgactttctagtgactattttagctatgacatcttaagaacccatgcagtatccaaagcaaagttactattttgcttatttccctgaaaataaaataaagtgtacacatagattgtgactgcatttaggcagatagaggatctagtttctaaaagattcttttgaagcatcatcaacccaaagaaaatttaatttacaaccatgtctgggttgagaaaatatgtccctaaggaaaagaaaacgtgatggatcaccaatccttatctcccgtttcaatagcactttcagggttgagaagctggttctgccacattctcacctatccatacggtatgtgacttcaccttgccctgtgacactgatgtatttttctttctctttgtggaatcagaaaggcagttacagagttgtcagtctttctcattgcagagcaattcaaccttgtttctcaatagatgttaaagggtgtaccctctgaggctcaaggaacttcacagacaataaagctgaaaacttgtatatatgggccagaaaatgatgagtagaagggctggaaattgtgacctccagggtatgacatgatcaatgcaattgaggactcacacagaagctgcatctgcctgaactgggtctgcacaagactaagcctgtcaacagtcaataatagatgaaggaagggcccagaaggccttgccctccctgtggaactactgattactgatagattctggggggaggaagagtcattgtcttagttgtgtatccaagtgtaaatcaaacataatccaatgtatagtcacaaacccatagtcatataaatgaccctggtcaaatcagttggtcacaaagcaagaaaagaagacacgtatgagaggaaagggtttgaagggaggaggagggactgataggggtgaaagagagataaaagatggcagaaatcaatcagaatctgttagatacatgtatgaaattgtcaaagaacaaattcagtcaatagaaagggtagaaaagggggtctgccttcacatcctcacttgacaggcgattcctaacaggatttaggcttttgcaagcactgagtgaatagcagagacacactaagatagactcaccctgttttgccatacaaaaaagtattttgctatttttttccatttctaggagttcagatgtccacaaacttaccatagcataataaactattaaggtgttttagaagatagaatgattaggctcatgcaaaaactgttttcaaagacagaatgataattttgattcaagaatattttttgaagttggttatttgaagatgtaaacaaattcccccttgctgactcaaggtcatatatacgaccagctgtgcgacaggaagaagaatgaagagcttgttactttcctgaaggaaaacaaaaacattttctcatctcatcttttctcagtaggtttcttatttcccagatgatgttctcaagtaggtcagaagatgggtaccatacttctatacagtactggttttcttatcaattgtgaaaacatacttgacaaaagctacttacagaaagaaaggtttgttttggctcagatttgttaccaaatggtgacaattacagttgccctaaacctccaggaataagggtcctaaaaagtgaggtgtgtgcatccggggtggagggatggaggagaaaataaagaagacaggtagctgtgatcaagaggtctacatgaactgatgactcatgccgatgactttatgtacaccctcttatattctgtttacatggggaaaacaggccaagatcagcagaaatctaagtcaaataatgttggcaaagagagcactggatacctcagacacagcaacctgaagactaataaccatagcccattgtgaaacttgggttcccaggaaccaaaatctaacatcttcaaggtgctagtcctagccctgaccagaccttgccacgtctaaccctgaacaaggacacagaattagcatttctcttcttaaggcctctggaaaagatctggcttggatctgtcctgctcccaacatagttgatattactatgtttcattcagttctgacccccccagacaacatgtgcccactagtgcaataatagtatgactactatgggagtaaccagccactttctgatttgaaagcaggactgttccacataagggaatttatgcctagagctataaaactgaacaaaagcccacaactagggatatcataggccctacggggaacctactatcattttcttaaaatggtcatgttgtcaaactatcttataaatatttgtttatttgcagacatctgggctacagagttggacagaggagcttacttttacaatggcaatggctaaagcagagactggtccaagtgatgatgagttcctgtgggtgctcagccttaaaaggaacatctagaacaactctcctaaggctcagagaccacagtaaaagaggaagcaaaggaatgtaagagctgaagtatgaggaggacgtctgtgaaatgctgtcttttggaaaggacatggccattgtcctcatgaatacacagcagttgtggttcactgcagaagacctacacaagatcaagttagtcaaagttccatgatggatagaggagggactcatgaggcaatagccctagatgaggagctcctggggactgatggaggttgtgagcaactggtaggctgcccatgttgcagtggatgactccatacccctgatcatatacacagcactaatgagacacagtggattatatatgtgtgcatacataggtgcatgcacatgtaatatatattatacatgaatgaaattattaaatataaaaattcaatgtattgtaacttttattaaattgtgtttaaaaagcaggattttgttaaatattttcttatagctgcacttgctatagctacaaactggttgctctgtgagataatggttaccctaattggctttactatactggccattttactacatactacatgtatcttgtggtacactatccagttaaaatatgcaatacatgttataaagaagaaaacctgttcagtttagataactgaccatttaatccttatcaggaggacttcaaagtactcacctaaggtgcaatttagattattaacatactgcatgcatataatgaagaacagtctctgttacactcaaaatcttctccaagtaaagcaaaaaaagtccagagtattgacctacagttttacacttttaatagttcttacaagaatttcatacctgggtaccgcgtctgcattactccctccctttactctccccattccaattcctccagtgtcacccaacctccaaaattcataatctcttctttattgctgctatatgtgtatacatatgtatttgtataggtgccggtggggatgcaggaccccaatggacacacctgcaatgcaaaccctaaacctaaggcacagagaaaattaaagaagacaggacagaaagattttaagaagcaaagacaactggaaactttagctgcgctgtcaactttggaaaaaagtatcccagtttcccgtgttgagttggcattgtacagaaattaacagccatattggtctagaaatgttgaacttaatttttttcccatttgtacaggggtaaacgcactgtattaaatatgtaaggtcttatctacgtgggtttgattccaaaaactaataaagtattctctaaataaaaaaaaggaattatcagaaaaaaatgtagatctcattgtcctaaaagatttacctgtactggcaacagctttgatggagatagtgaataatgatatgcaaaacagataatttagcagagactgtaatgaaagaagtaattcagtcacatgtaatcccccaaaaatgatacctttacaggttgtttttctttttctttgcttcattttttcctttgaaatgaggtgtgattgtgtagcccacactggccttgaatttagactcttcctgtgtgctgagattacatgtatgtgtcattgaacctaagcaactttccctcccaatgcagaaaaaaaatctggtaaccaatgaatgataagcacagacataaaaaactgaaccaatttttgaaaaaatggcactaaaaattcaagtggtgagaggcaaggggaacatggggggaggggtgtgatggagaactttggttggaatgtaaaataaaatttaaaaatagaaaaaaaagaagcaaaggcaagagactcatgttgacagatcctgtcccctagatatgactgggaaaaattacccatgagctctcaacaatatgcttccatacacaagaccagaatattggcataacaatggacatgcatgcaatgtggacagaggaacttccacacggcctcacccctagatgaagaggaagatatatataatgaaggatccttttcctggagaactggaagtgcatatgaatatattggaaagagttgcaaggtgagggagccattataggtttaaagagaaatctggcactagggaaatgtgcagagatccaaaaggatgacaccaactaacaatctaagcaatagtggagaggctaccttaaatggccttctctgataatgagattgatgactaccttatatgccatcctagagccttcatccagtagctgatggaagcagaggcagacacccacagctaaacactgaactgaactctgaaatccagttgcagagagggaggagtgatgagcaaaggggtcaagaccaggatggagaaacccacagaaacactgacctgaacaatgggttgctcatggaccccagactgatagctgggaacccagcataggactgttctagaccccctgaatgagaaggtcagtttggaggtctgggacatttatggggccactggtagtggattagtattcaccccgagtacacaaatggactttgggaggctactccacatagagggatactctctcagcttagacacacttgggagggtctaggcattgccccaaatgagatgacagactttgaagatcctcgatgtaaggcctcactctcccttggatgcagaaagggtttgggatagagggctggttgggggggggcagggaaggagggtagggagagggaattgggattgacatgttaaagaagattgtttctaatttaaataaaaaccatactgcttatcaagctttcgtctttctatgagagccctctatgaaatagtaactattagctccacttagtagatgacagtggcgaggcctgaaaaggctgacaaagtcataagtgacaaatccagaatctgagttctgtgatagtaacattctaagtcatgatcacactaagtcactagtatgatgaagcaaaactagtgcatttctcagtctgttatttactctcatgagcataggaaataacactattgttagttaattgatttgggttaggtgttgaagaaaataaatgtttgtatacctttaaaagtattctgtgagcaaggtagtgtattcaactgcaaacaaatgtttcaagctctatgactagccagatgtgccagcgtgggggcaccttttttaatgtctctgattttattgtaacctaaaagctgagagaacagggactagaagagttcttttgtcttttctagcataaatagctctaagggcagtaacaacagtgagatcattattaggaccagaggaaagaggagaatcgatacacatggcaaagtgggcctgaaatcattagggaaatttccctggcaacattacaccagagagcaagtgtctgtctatagtgtgttccctctaattggcctttctccttccatcctggctctcaacaggatcccagtgtttctgtctcatttgctgagagtggacagctaaatccatggccaaaagcatccacttaggagagcaatcatctcaactggaaaatatactagaagataaataggcagtttgaatctttcaaaagaaccatgtcttcttccaagattggcattggaactaaaagtcaagacttagaaggtgggatctgtgttatctcaagacccttgaagtttttacattagaacttacgtgggaatatgttcttagaaattagcctcgcccattgaacccccacttccttaccctgaatggtattttctctctctttactcagatttctgaccttcagtgaatagaattacctcaaacataagtctggggtgtgagatgggtactgaattctaaaatatctaactgtgaaatccatgaccttttgtttgttcacttgtggtatgaggataaagaggtcatctaaccacgaataaaacagtgaatgtaaatcctggcagtggtgtaagtcagtcatagagaccttaatcgaaacacaatgactttgtgtcaagaaagttgtctgagttcaaaacatgcttgtctatgtttccccatttcttcatcatcagaatgcttatatttcatttttcttcttcacaattctgctttcaaaataattacttgatctctgttgaaatacatggcttgattaataattttcgggtagctagagacaaagtaagtgttaatgatatgacacagtactcatgtagtctcttttgctgcgttgaaaggcttcacacagcttttgtcccggcagcctgtgatcaacagaatgacaaagcagattactggaaagcccacaataggtgcagatagtgtgtgtctgaatgtcagccttctggcttctttaacttgaatcttctttaacttgtcattaacattctcagcatcatctggttttgtgcttcacatgcctcaaactgatcacatcttcatcaggtcagcactgggaaacatcttgattagctctgtgtacctacttaaaagtctccattcaggatttacatcaattaactttccttttccagatgtccagagagatggtgaatccagggatcatatccatcaaagagagtgagtatattcagagttccccctttgccacattgtaaagatatcaggaaaaatcttactgggagggggctggagagatggctcagtggttaagagcactgactgttcttccagagggtctcggttcgattcccagaaacaacacagtggctcacaaccatctgtaatgagatctggtaccctcttctggcctgcagtcatacatgcagacagaacattgtatacataataaataaataaatcttttaaaaaatcttacttggaataaaaataatagaccacatctcctcaggcttgtctggaaatggtggactgcacagaatagactgaagcttggctgcccgtgttaccagagtgcaattgaggaaaatgatgaaatctgttagagctgatgatctagaatttccctgaacttagccctttatgtcagagttttggggatgctcataaccctcccagtcaactcagggatcaagggcacctgtgctcactttgttaggaaaaaagagcaactatagttttcttaagcagtttagacaaattcatagtggaagggagcatcagatatgaccctcttattctgaacctttaaccataatccttcaatgtcattaccaaagaaccaaatcacctatcaaatgagataatcctaccttagtgccaagagtgaactaccacttccagattgggtgtttcataagagggcttccagaggatttatttcaaaattgtatggacaatacattcataattctatcataattataattatactccaggatactttcaaaatgttgtattaagcaaattagcaacatttaagaaatccttgtaagtatggtaactattcttaaaggaaagaagtaacaaaaattacaaaagtcataatctggcatataaagctatttcagatttattttgaaataatcacacctacattatgagtataatgcaccagctacaccaacaagtatcagtgaactactaccattttatttcaatcaatggcatctgccttctattacataatgtgagcttttcatgggtatttagtaaatatttccagtcaatctttttgggtttttgtttgtttttattattataattgtaatttgaccaattttaaattggaaacaagcttctttaacatgtcaatcccagttccctctccctttcctccacactgccctgcaccaactctctattccaacccctttttgctccccagggaggatgaggccttccatggaggatctactaagtctgtaatatcatttggagcagggcctagacccttccaagtgtgtctatgctgagaaagtattcctctatgtggagtaggctgtcaaagtccattcgtgtactagggatgaatactgatccacctccagaggcctcataggttgcccagatctccaaactgacctcctcattcagggggtctacaatagtccaatgctggtttcccagatattagtctggggtccatgagcaacccattgttcaggtcagctgtttctgtgggtttctccatcctggtcttgacccctttgctcatcactcctccccctctgcaactggattccacagttcagctcagtgtttagctgtgggtgtctgcctctgcttccatcaggatgaaggctctaggatggcatataaggtagtcatcaatctcattatcagagaaggccatttaaggtagcctctccactattgcttagattgttagttggagacatccttgtagatctctgaacatttccctagtaccagaattcacttaaacctataatggctccctctattatgatatctcttttcttgctctcctctattcttcccctgatagatcttcctgctccctcatgtcctcttctccactcctctactttccttctatttcttctagctccctcttccataaccccgatgctcccaattagctcagcagagcttgtctctttacccttctccagggcaccatgtagtctctcttagggtcctttttgtttcctagcttctctggcagtgtggattgtaggctggtactcctttgctctatgtctaaatctatatatgagtgaatacataccatttttgcctttttatgactgggttatctcactcaggattgtttcttctagtcccatccattttcctgcaaatttcaagattccattgttttttcctggtgagtagtaatccattgtgtaaatgtaccacattttctctatccattcttcagttaatggccatctaggttgcttcgaggttctagttattacaaataatgttgcaatgaacatggatgaacagatgtccttgtggtatgaaggtacatcttttggagtgtacattccatctaagagtgaaattgttggatcttgtggtagactgattcccattttcctgaggaatctccatactgatttccaaagtgactgcacgagttggcacgcccaccagcagtggaggagtgtgcatctttctccacatcctctccagcatagactatcattggtgttattgattttagccattctgacaggtacctcagaattatttagatttgcatttccctgatggctaaggatgttgagcacttccttatatgtctttcagcattttagattcctctattgagaattctctatttagctctgtaccccattttttaattggattagttggtgttttggagactagcttcttgatgtctttgtatattttggaaatcagccctctgtcagatgtggggttggtgaatatcttttcccagtctgtgggctgcctttttgtcttgttgactgtgtcctttgccttacaaaagcttgtcggtctcaggacgtcccatttactaattgttggtctcagtgtctgtgccactgttgttatgttcaggtagttgtctcttgtaccaattcattcgaagggtactacctatcttctcttctaagaggttcagtgaggctgtatttatgttgaagtctttgatccatttggacttaagttttgtgcatggtgataaatatggatctatctgcagtcttctacatgccagcatccagttatgccagcaccatttgttgaagatgctttccttttttccattgtataattttatcttctttgtcaaaaatcaggtgtttgtaggtgtgtgggttaatatcaagagttttcaattttattcctttggtctacctgtctatttttgtgtcaataccaagctgttttcatgactatagatgtataatagaacttgtagtcagggatggtgatgcctctggatgctattttattgtacagggtggttttggctctcctgggtattttgtttttccatataaagtgattattgttctttcaaggtctgtgaagaattgtactgggacattgatggggattgcattgaatctgtacattgcttttggcaagattgccatttttactatgttgatcctacctgtccaagaacatgggagatctttccattttctggtatcttctttaatttctttctttaaagactcaaagttgttgtgatacaggtctttcacttgtttggttagtgttaccccaaggtattctatgttgtttgtggctattgtaaagggcaatgtttctttgatttctttcccagcccttttttcgtctgtaaatagtagggctactgatttttttgagttaatcttgtatcctgacacttttctgaaagtgtttatcagctgtaggagttccctagtagagttttttgggtcacttatgtaaactatcatatcatttgccaaaagtgaaagtttgacttcttttccaatttgtatccccttgatcttttttgttgttgttgtctaattgctcgagctagaacttcaagtacaatattaaagaggtatggggagagtggacagccttgccttgttcctgattttagagaaattacattgagtttctgtccattagtttgatgttggctgctggtttactgtatattgcttttattatgtttaggtatgttcctgttattcctgatcactccaagacctgcatcatgaaggggtgttggattatgtcaaaggctttttcagcatctagtgagatgaccatgtgagttttctttctgtttgtttatatggtggattatattggtaaatttttgtatgttgactctctctgtagccctgagatggagcctacttgatcatggttgatgatttttctgatgtgttcttggattagatttgcaagtttttattgaatatttttgcaacagtgttcatgagggatattggtctgtagttctcttttgtaattgtgtctttgtgtggtttgggtaccaaggttattggaaccttgttaaaggacacttatgaagtgtcttaatgacccttatgcttctattgtggaacaatttgaggagtgttggtattagctgttctttgaatttctggtagatttctgcactgaagccatctggccctggccttttttgggttgggagacttttgatgactgcttctatttcattagtgggtataggtctatttaaattgcttgtctgttcttcatttaattttggtaagtgatatctatccagaaaattgttaatttcctttagattttcgaattttgaggattacatgttttcaaagtatgacctgatgattctcttgatttcctcagtgtccattgttatgtcccccttttcatttctgatattgttaatttgcatgttcattctctgccatttattaaatttggataaaggtttgtctatcttgtccattttcttgaagaaccaactcttcattacattgactacatgtgtattgttttcctagtttctactttattgatttcagcccttcatttgattatttctttgtgtctactgctctagggtgggttttcttccttttgttctagagctttcagttgtgctgctaattctctagtgtgactattctccagtttcttcatgtgggcacttagtgctatgaactttcctcttagcactgctttcccataagtttgggtatattgtgtctccattctcattgaattctaagaagtctttaatttcttttttagttcttccttgtcccaaggatggtagagttgtgtgttattcaatttccatgagtttggaggtcttctgcaatttgtgttaatgttgaattctaacttaaaagtatggtggtcttataagatacatggagttattctgactattccaatttttttgtatctgtttaggtttggtttgttgctgagtatatggtcaattttagagaaggttccatgtggtgctgagaaggaggtatattcttttgtgtttggatagaatgttctatagatgtttgttaaacccaattgggtcataacttctattagtttctttgtttctttgttaagtttctgtctggtcttcctgtctagtggtgagagtaggatgttgaagtctcccactctaagtgtggaaggttttacctgttatttggtaatgtttttagcaatgtttcttttatgaaatgtgagtgcctttgtatttgggacatagatgttcagaactgagacttcatcttgatggatttctcctgtgatgaatatgaaatgacctccttcatctcttttgattgattttagtttaaagtctaatttgttaaatattaggattgctaccccctgcttgtttcttgggtccatttgattggaaaatcttttcccaacccttaactctgaggtaccatctatctttgaacttgaggtgtgtttcttgtttacagcagaaggatggattctgtctttgtatccattctgttagtccgtgtctttttataggcgagttaagaccattaatattgagggatattaatgaccattgattgttcattcttgtttgttttggttttggtggtaatggtggaattgcgtgtggatttcctccacctttttttctttcagctgttggtaaagtgggattatctattgcctatgtttttctcgttgtaactaccagaaaactccttgggttggagttttcattccagaactttctgtaaggctagattaaatctggttttgttgtggaatatcttgttttccccatctatagtgattgcaagctttgcttgatatagtagttttggctggcatctgtggtctcttagtgttggtagaatatctatccaggaccttctggcttacagggtttccatggtgaagtcaggtgtaattctggtaagtttgcctttatatgttacttgacctttttccttagctgctcttaatattctttctttattctatatatttggggttttgattattatgtggcgaggggacttttttgtggtccattctatttggtgttctgtaagcttcttgtacttttattggcatgtctttctttaggtttggaaagttttcttttatgaatatgttttctgtgcctttgaagtgggtttcttcactgtcttctacacctattatacttaggttttgccttttcatggtgtcccacatttcctggatatttttgttagggatttgttggacttaagattttctttggtcgatgaatctatttctcctagtcagtattcaacacctgagattctcttttccatctcctgtatactgttggttatgcttgcatctgtagttcctgatcatttacccagcttttctatttgcagcattccctcagtttgtgttttctttattgtctctatttcaattttcaggtcttgaactttttccttcatctgtttctgtttgattatcttttcttggctttctttaagagatttgttggtttcttgtattttgggttgtttttcctccaatttaatgggattttctcatatcctctttgaggccctctatcattttctcgaagttgtttttaaggtctttctcttctgcttcatctgtgttgggatgttcaggtcttgatggtgtagagtccctagactctggtggtgtcatgttggatttgctgttgttgaatgtgtttttatattgtcttcttcccatcccttcttccagtgggtacaggaggagtctcttcctctcctggtgggtacaggacttaggttcccttacagtgggtgccagcaggttcaatgcactgatggctctcctctttctcatcccgtgggcagagaaagggcctaagatgttggctggcagtctctggtgctctggacctggttgggatgggatccacagagcacagtccccaggctttaggtggctcccagaagggcaccagaaggtaggctccagtcaatcttttaaatatcttttaaaaaatcctcatgacattacatgaatcagtaagatctggaaaatacatggacagctagagaaggcatgctggggctttttctgcagaaggacaatggagcatttctcccctccaaacttactggaggaagagacagaaaatggtactcattcatttgacccgaccatgccttctttctctcctgtctgatactaggaccatggatacaatgactgaaggaagaaatattactgagatcacccagttcatcctcctgggattctctgatttccctcaaatcatagcattgctctttgttatgttcctcacactttacattacaactctgacctggaacctgtcccttcttgttttaataaggatggactcccacctccacacacccatgtacttcttcctcagtaatctgtcctttatagacctctggtacatcacctctacagtccccaagatgctctcaaacttcttctgggaaaagcaaactatcagctttgggggatgcatagttcaatactttgtcttttccactatggggctgagtgaatcttgcctcatgacagctatggcctatgacagatatgctgcaatttgtaacccactgctgtattcatcaatcatgtcacccaccctctgtgctcgcatggtgatgggaagctatacagcagggctcctaggttctttatctcagatatgtgccttgctgaagctccacttctgtggacctaatgttatcagacatttcttctgtgacatgccccagctattaaatctatcctgcactgacactttctttgcacagatcctgcttgccatattaaccatgttttttgggcttacaaatgccttaaccatcatgatatcctattgctatattgtcttgtccatcatgaagatcacttcagctaagggaaggtccaaagcattcaatacctgtgcttctcacctgacagctgtttccctattctacacctccagtgtctttgtctatttgagttccagctctggtggctcctccagctttgacaggtttgcatctgttttctatactatgatgattcccatgttaaacccattggtttacagtctgaggaacaaggaaatcagagatgctgtaaagaggttacaaaggaagatgggatggaggctgtcctaacaaaagattctgagactatctgccctacaaaatacccaagcattcaaatttataactttttttttttttttttttttgagacctttggaggctgtcctggaactagctcttgtagaccaggctggtcttgaactcacagagatccaccttcctctgcctcccgagtactgggattaaagttgtgagccaccaatgtgaatgcatgtgcccggctcaaatttataactttttaaagctgcttcagttgaaaacttctcagccctgagatctgtccctacagaagatgcctgactgggcctcccagggtccagaacctttgtctcacaaatggcccaatgcagcataataaagacctggtgggttgttgtttgtttctgaacaagggacctaatgttcgaagcaataaaaataacattggctcagctgtgcctactggaaacaaactactgataattacagtatttctaagacaaatcaatgctaaccatctaccaagtctcaggtcatagtcttgtctccaccagctcctggataatgaagaagacatggtcagtagtaatgaaggacatggtttgttcagagctatttaatatgagtgtggttatttgattcttgaaaccaaagtccagatgaaatttcatatttaaattccaaaaccaatagcaatatctgacactgttgtttctttcgctgcattaaagcatgactattttttgacatagaaattggcatcttactgtcaaattgcttcttatatttcaactatctgttatagttcttatagtaatacatgtacgagttcactgtactaagttactgaatactcaatattctaaagaccaatcgtaaatatggaaacttctgcataggcctccaaatttaaaaaagaaaacaatatagttataatcaagacactactaagtatccatcagagatcctgaaccctgaatacaagtgtcttcgaggaacttggatggcctgttgtgaagagaccacagttacttctttatatttgggctgctaaaaacaagtttgtattaagacacaatggcattagcttgttccataattactttcttctagttactttatcacttaagattatactgggaaaatgctcaaaaccacctttaatggtgattgtttttgctagtgaaagaggagcagaggtgaagcgaagattggcaggaggaagtctgaagagatagaccacacttagccctgcacgctttctcactttgcccctaggagctaatgtggcagatggtgcttgctttattagtagggataatggagttagatcaagtttcctcaccctggctgacgttggggcattatgggatagtaaaaataaatatataaaccttggttactaatttattgagtttttggttgtttgttcagcagatccaaacctcatgactatgacatttgacttagtatgatcatagactccagacacccagtaacccaaaaatttctagtcattcatattatttcaccatatacaaataatttgctttactataaaccatgctgtagcttattttgggtacttacagataactaaaacttcatgcactctccactaagcctagttttaccaaagactatacaataaatagattccaaacaaatatatctggaatatagcactgacccataaatgataccttcttaaaaatcattcaaattctttttattataaattatatttaaattagaaatgatcttattttacatgtcaatcccagttcccttccatcctcgcatgcccccccaccaaccctcccatcccccatcccctccccatggagagtgaggcattccatgaggtatcatcaaaatctgtcaagtcatttggggcagggcctaggccctcccccatgtatctaggccgatagagtatccctccatagggaacgagctcccaaagtctgttcgtgtgctagcgatacatcctggttccactgccagaggtcccatagactgcccagggcacctacctgacatccacattcagggggcctggtttggtgctatattggttagactggggaaccaacttgctcaggtcagctgtctcgtggattttcccagcatggtcttgacccctttgttcatcactcctccctctctgcaactggattccaggagttcggctcagtgtttagctgtggatttctgcttcttcttccatcagctaccagatggaggctctaggatggcatttaaggtagtcatcaatctcattataggggaagggcatttaaggtaacctctccactattgcttagattgttagttggggtcatccttgtggatctctggacaattctctactgccagatttctctttaaatctacatgtctccctctattgatgtgtcttttttcttgctctcctctattcatctcccgactcagtcttcctgatccctcatgttcttctccccctcctcttctcccttcctctttttcctatctccctccctcctccctccatgctcccaatttgttcaggggctcttgtcccttttctgttcaccgggacaccatgtatgtctctcttacagtactccttgtttcctagcttctctggaggtgtggattgtaggctggtaattctttgctctatgtctaatatttgtatatgagtgagtacataccatgtttgtctttctgtgactggctaatctcacttaagatggtttcttctagttccatccgtttgcctgaaaatttcaagattcaaatttttcctccattgggtagtactccattgtgtaaatgtaccacattttctccatctattctttgcttgaggagcatctaggttgcttccaggttctggctattagaaacaattctgctatgaacatagttgaacagatgtccttcttgtatgaatgtgcatcctttgggtgtatccttaagagtgggattgctggattttaaggcagactggttcccattttccagagaaaccaccatactgatttccaaagtggctgttccagttagcattcccaccaacaatggaggagtgttcccatttctccacgtcctctccagcataaactgtcattggtgattttgattttagaaattctggcgggtgtaaaatggtatctcagggttgttttgatttgcatttctctgatggctaaggatgttgagcactttcttatgtgtctttcagctattttagattcctctattgagaattgtctatttagttctgtaccccactttttaattggattagttggtgttttggagactagcttcttgatgtctttgtatattttggaaatcagccctctgtcagatgtggggttggtgaagatcttttcccattctgtgggctgccatttttgccttgttgactgtgtcttttgccttacagaagcttctcagtttcaggtggtcccatttattaattgtcaatctcagtgtctgtgctactggcgttatgttcaggaagtgctgagggcatggctgagtggtagagcatttgcctagcatgtgcaaggtactcagttcagtccccagccccaggggttaaaaaatttgatggggttggagagatgactcagaggttaagagcactgactgctcttccagaggtcctcaattcaatttctagcaaccacatggcagcccacaactgtctataactctagttcctgacacccttacacagtcatacacatgcaagcaaaacaccaatgtacataataaataaataaatacataaaaagaatgaaatcattcaaattcttaaattcaaaagctatttattacatgagttttattgtgaaaagattataggaaagtattgttttgccataaacaatgatatatattttctttctctgaagctaaagatgagacacataaattaagattcaataatcaaaaaatatgggtatttacaaaaaattgctgaggtatgctgtgagatattccttacactgtgtgaatgtatgttgctgtgcctgatttaataaataagctgactgtccaatagtgtcagggcccctaaaatggctccacttcatcttgacttaaggtcagagattttaaaactacccttactcttccaaggttaaagttgtaaggcctaaatgtctaaggtgtggctactgaaagatgtttgttttaaggtatgcatgtctaatctaaataacaagagacttggtctaagatgtggttactcttaaccttcaatgtcagataacaagagattttgcctactgaatatttggtaaattaaggaagtctatttgtttcttatatcatggtaaagtagtctcttgctttttcccctttttggtttgggtatattagaatgttgaagaataaacttgtggcatccagaattcacagaattgccctcccaactctattgtgtctctatatttcccttagtatctttacctgccattttctcaatccacactccccctctcaggtataaaccatggaagttggctgaatccaacaagatccccccaaagcaggttcctatacaatacatgattgggcatgagagccagactatgagaattctgggaggaagagaagagtggagtctggagtggtcaaccagacacagagggagcaggagatgatcttgccaggttgatagaatataccaccaagtagcagagcaaaaacaagaaatatggtttatttaaaatgtaacagttagctagtaacaagactgagttattagcagggtgtttataattaatattaagatacaagactcgggctggagagatggctgacaggttaagagcactggctgctcttccagaggtcctgagttcaattcccagcaaccacttggtggctcacaaccatccattatgagatctgatgccctcttctggtctgcaaatatacatggaagcagaatgttgtatacataataaataaataaaatattttaaaaaaagatacaagactctgagtcagttatttgggagcagctggtaggacagacacttctgcctacagaggtaagcttcccactgaccatctcttctctctctgctcacatttgtgaaccccttcctaacctccttcctcctacagcccccaaccacagcaggtagcccctgctaatccaagggcatctccttctagggagccataagctgaagatagacccatacctctcctactgctcctgagatctaatctccccattctcatccacagctctaggaggaaattcaccatggacaacctttactctctgaccccatccctaacacttcacaaagaccttcttccccatccttcctcccttgctctctctttccctccctccctccctccttccctgttttccttccctctttccttccttcccagctcatcccagtccacccttcctcgcaggtaaaggcccccatgaggagtcaacatagtctgcctcattaggttggggccggctctggtccctctcccatgcattaagactgagcatgacatcccacaatagggaatgggcaccaacaagctagctcatgtaccaggattatatcatggttctactgccactgagcatggcatctcaccctaaggaatgggctctaacaagcctgctcatgtaccaggtttgtgtcatggtcctgctgccagggtcctccctgagtgccagttcaggcactgtctccattacttctaggagtcttagttgagctcatccttgtggattcctgggattttcctggcaccaggtttctcccttactccaaatgccctcccatcaggacatctctttcattattctcccctccatcccagccacaacccacacaaccaaatccctcatgttcccttctctccacccctaccctgtccccagtttacccaggagatctctactatttacccttcccagggaagtccataaatccctctttgggccttccttgttgcctagacgttcagtggctgtggattatagtctggttattctttactttccagctaatatccacttatgagtgagtacataccatcttttactttatggatctgggttaccttactcagggtgattttattctagttgcattcatttgcctgcaaatttcatgatgtcattgtttttgcagttgagtaatactccattgtgtaaatatatcacattttctttgtatgctcttacattgaggagcatctagtttgtttcctagttctggaaattatgagtaacactgctatgaacatagttgaacaagtgtccttatggtatgattgagcatattttgggtatatgcccaagattggtatagttgagacttgagatagagtgatttccaattttctaagcaaccacccacatcaattttgaaaatggctgtataagtttgcaatcacaccagcagtagaagagtgttccccttactccacatccgctccagcaaaatctgtcattagtgtttttgatcttagccattctgacaggtataagatggtaactcagagtcattttgacttgcaattccttaatggctcagggtgttgaacaattatttaagtgtcttggccatttaatattcttctgttgaaaattctctgtttaaatctgtgcccatttttaacttgattatttggtattctgatatctagtttctttttataatttagagattattcctctgtcagatgcagggttgtttaagttctttccccattcttcaggctgccattttgtctatttacaaagttcttgtgcaccagacttagaaaaaagagttagaaccaatattcctcaaattattccacaaaatagaaacagcaaaaacactgccaaattcatcttatgaaaccatagttactccatacccagaccatataacagttcaaaaagaaagagaatgacggatcaattgtcttatgaatatagatgcaaaaatacttaataaaatgcttgccaattaaacccaagaatacataaaatgatcacccaccattaagcagtcttcatcccagaggtgcagagatggttcaatatatgaaagtcaataaatgtaatacacaaactgaaagacaacatttatgtggtcatctcattagacgtcaaaaaaacctttgacaaattccaacacccttttctaagaaaaatcaggagcatacctaaacatcaataaaggcagtttacagttaaaattgtagccaacataaaattaagtggagagaaactcaaagcaattcactaaaatcaagaacaagacttgaacaagaataactctctctatatctgttcaatatagtacttgaagtcttagctaaagcactatggcaactgaaggatatcaaggggatacaaattggaaaggaagaaggtaaaatatagttatttgcaaatgatatatttgtatgcataagtgaccctaaaaattcctccagaaaactattacaactgatatacacctttattgatgtggctggatacaagattaacttaaaaaaatcagtatctctcctatatacaaataacaagtggtctgagaaataaatccaggaaacaatgtctttcagaatagtctcaaagtggttagtgcgggcccttctctggcccaccttctacctgccctccctggggtttcctggtgaaccctcctccagcaggccaagccatccagagtctgcctacatcacagtggtagtcctgcctccacccactgggagagggaatgtctcagacccgcctgcacccaccaggagagccatcagaatattggaccggttttcagccactggaagagaaccttggtcccatatccacaaggagagggagagactccacctgtacccactggaagaagggagggaaagacaatagcataagaacacatttaacaacagaaagaccaatatggtgtcaccagagtctagggactctacaccagcaagaactgaacatcccaacacagatgaagcagaagagaatgatctaaaaacaactttatgaagatgatagagaccctcaaagaagaaatgagaaaatccctcaaaacatggaagaaaaaacaaaaaaagaaagaaatggaggaatggacaaacaaaaattataagaaataaacaactctcttgatgaaagccaagaaaagcaaccaaagtagtgaaggaaataattcaagtggttcaaggcttgaaagctgaaatagaaacaattaaaaaagcacagtctggggaatgctggaaatagaaaacctgggtaaacgatcaggaactacagatacaaacataaccaacagaatgcaagagatagaagagagaacctcaggtgctgaacataaagtagaagaaatagattagcaaccaaagaaaatcttaagtccaacaaatccctaacagaaaatattcaggaaatatgttacaccttgaaaagaccaaacctaagaataataggtatagaagaaggcaaagaagccaagctcaaagttgcaaacaacatattcagcaaaatcatagaagaaaactttcccaacctaaagaaagaaatgcctacaaaaatacaagaagcttaccagacaccaaatagactgggccaaaaaaaagtcccctctccacataataatcagaacaccaaacatacaaaataaagaaagaagactaagagcagaaaaggaaaaaggccaagtaacatatataaagacatacctatcagaattacacctgacttctcatggaaactctaaaagccagaaggtccaggatagatgttctacaaacactaagagaccacagaagccagccctgccagcccagacaactaaactcagcaaaactctgggttaccatatatggagaaaacaagatattcaatgacaaaaccagatttatacaatatatatacacaaatccaaccctacagaaactactggaaggaaaactccaagtcaaggaatttaactacaatcacaaaaacataggaaatagataatcccactttaccaaaagccaaaagaaaaaaggtggagaaatctacacacaattccaccaccaacaaaaaatccaaaacaagaataagcaacgaatggacactaatatccctcaatatcaatggtcttaacttaactataaaaagacacaggctaacagattggatacaaagacagaatccatccttctgctgtaaaaaaagaaacacatctcaacttcaaaaacagacattacctcagattaaagggttgggataagatttccaatcaaatggacccaagaaacaagctggtgtagcaatcttaatatttaacaaactagacttcaagctaaaattaatcaaaagagatgaagaaaggcatttcatattcatcaaaggaaaatccatcaagatgaagtctcaattctgaacatctatgcaccaaatacaaaggcactcacatttcataaaagaaacattactaaaacccaaataacataaaacctcacacacttacagtgagagacttcaacaccccactctcactactgaacagtaccaccagacagaaactgaacaaagaaacaaaggaactaatacaagttatgacccaattaggcttaacagacatctacagaacattccatcaaaacacattctcagcaccactggaactttctctaaaattgaccatatattcagtaacatagcaaacctcaatatatacaaaaaatggaataactacctgtatcttatcagatcaccatgacttaaagttataattcaacaacaacaaaaattgcagaaaccttaaaactcatggaaattgaacaacgtgcaattgcaccattcctgagttaaggaagaaataaacgagaaattaaaaacttcctagaattcattgagaacgaagaagacacaagataaccaaacttatgggacattttgaaagcaatgcaaagaggaaagttcgaagcactaagtgcccacatgaagaaactggagaatattcacattagagaattaacagcacacctgaaatctctagaacaaaaggaagcaaacttaccccagaggagtagacacaaagaaataatcaaattaagggctgaaatcaataaagtagaaacaaaaaaaaaacagtacaaagaatcactgaaacacagagttggttctttgagaaaatcaacaggataaacaaacctttatctaaactaaccaaaaggcagagagagagcatgcaaattaacaaaatcataaatgaaaagggggacataacaatggacactgaggaaatccaaagaatcattatgtcatactttgaaaacctgtaatccacaaaattgaaaaatttaaaggaaatgacaattttctggatagatattaattaccaaaattaaatcaagaacagacaagcaatttaaatagacctataacccctaatgaaatagaagcagtcatcaaaagtctcccaaccaaaaaaagccaaaggccaaatggtttcagtaaagaattccaccagaaatttaaagaacagctaatacaaatactcctcaaattgttccacaatagaagcagaagggtcattgacaaactctttttaacaagactgcaattaccttggtacccaaatcacacaacgtcacaactaggaaagagaactaattagagaccaatcttcctcatgaacattgatgcaaaaatatccagtaaaatactggcaaattgaatccaagagcatgatggggaatgtacttctgtgtatgtttatctcatttgttgaataaaatactgtttggtcaatgaaacaggaagataggcaggactaggagtcaaagaggattctgggaaatgtagtagagaagtcttgatccaggcaggaagtgacatagcaaggagaatcatatttaagcgaaggagaaacaggaaaacactcttttccccttcctcctccagcggtgtcatgtgagccaccggcaagaagggctgccaataagcgtctgataagataagtcttataaaatatatagatttatgataattaagactgagctaacagatgagaatcctagtcactggccaagagcatttgtacctaatatgtctctgtattattttgtccatccacgcagcgggcagaactcgggcggctggtggagaccgcccacatggcagtagggctcaggtggctttttggcagaaagatttactgtaacgagagcacatcaaaaaaatcatccaccatgataaaacaggcttatcccaaggatgcagggatagtttaacatatgaaaatccatcaatgtaattcaccatataaacaaactgaaaaaaaaaaatgatcatctcactagatgctgaaaaagcctttgacaaaatccaacaccccttcatgatgaaggtcttggagagatcagtgataacaggaacatccctaagcatgataaaggcaatatacagctagccagcagccaacagccaacatcaaactaaatggacagaaactcaatgagattcatgtaaaatcaggaacaagacaaagctgtccactctcgacatacctcttcaatattgtacttgaagttctagctagagcaataagacaacaaaaggagatcaaggggacacaaattagaaaggaagaagtcaaactttcactatttgcagattatatgatagtttacatagtgaccaaaaaacctctaccagggaactcctacagctgataaacactttcagaaaagtggtaggatacaagattaactaaaaaaatcagtaaccctactatgtacagatgaaaaaaagggctaagaaagaaatcagagaaacatcaccctttaaaatagccacaaacaacataaaatatgttggggtaatgctgaccaaacaagtaaagacctatatcacaaaaaatttgagtcttcaaagaaagaaattaaagaagataccaaaaaatggaaagatctcccatgctcttggataggtaggaccaatatagtaaaaatggcaatcttgccaaaagcaatctacagatgcaatgcaatccccatgaaaatcccagtacaattcttcacagacctttaaagaacaataatcaactttatatggaaaaacaaaaaatccaggatagccaacccaaccctgtacaacaaaggaacttcaggaggcacaccatccctgacttcaagctctattatagagctattcttctgtaaaaagcttgatattggcacaaaaatagacaggtagaccaatggaattgaattgaaaaccctgaaatggacccacacacctatgaacacctgattttttgacaaagaagctaaatgtatacactggaaaaaagaaagcatttcaacaaatggtgctggcataactggatgctgatatgtagaagattgcagatagatccatatctatcatcatgcacagaacttaagtccaaatggatcaaagacctcaacataaatccagccttactgaacctcttggaagagaaagtttaaggtacccttgaaggaattggtacagcaggctacttcctgaacacaataccagtagcacagacactgagatggacaaataataaatggtacctcctaagactgagaagcttctgtaaggcaaaggacacagtcagtaagacaaaatgacagcccacagaatggaaaattatattcaccaaccccacatctgacagaggactgatttccaaaatatacaaagaactcaagaagctagtttccaaaacacctaataatccaatttaaaagtagggtacagaactaaatagagaattctcaatagaggaatctaaaatgactgaaagacacataagaaagtgcttaacatccttagccatcagggaaatgcaaatcaaaacaattctgagataccatcttgcaccagccagaatggctaaaaatcaaaatcaacaacagtttatgctggagaggatgtggaaaaagaggaacacttctcgactgctggtgggagtgaaaacttgtgcagccactttggaaatcagtatggcagttcctcagaaaaatgggaatcagtttaccacaagatccagcaattccactcttaggcatatacacaaaggattcacattcatatagcaatgacatctgttcaactatattcatagcatcattatttgtaatagccgaacctggaagcaacctagatgcccctcaactgaagaatggataaagaaaatgtagtacatttacacaatggagtactactcagtggaaaaaaaaaacaatagaatcttgaaattcacaggcaaatggatggaactggaagaaacaatcctgagcgaggtaacccagtcacaaaaagacaaacatggcatatactcactcatatctgtattttagacatagagcacaggattaccagcctacaatccacactgccagagtagctaggaaataaggaggaccacaagagagacacacatggtcccccttagaaagggaaagggacaagatctcctgagctaattgggaacatggagggagggcagagggagttaggataaagagaaggggagaagatgagggaagatgaggacatgagggagcaggaagatctagtcaggggaagactagaggagagcaaggaaagagataccataatagagggagcctttataggtttaaagagaaatctggcactagggaaatgtccagagatgtacaaggatgaccccaactaacaatctaagcaatagttgagaggctacattaaatacccttcccctatgagactgatgactaccttatatgccatcctagagtcttcatccagtagctgatggaagcagaaacagatacccacagctaaacactgaactgaactcctggaatccaattgcagacagggaggagtagtgagcaaaggggttaagaccaggctggaaaaaaacccagagaaaccactgatctgaacaaggggaaccccagactgatagctgggaaatcagcataggactgatccagaccgcctaaatgtgggtgtcagttaggaagcctgggaagtctatgggtcctctggtggtgtatcagtatttatccctactagaagaatggactttgggagcccattacacatactctctcagcctagaaacatagggaagggcctaggccctgcttcaaatgattgacagactttgaagattcccccatggaaggcctcgccctccctaagggacagaattgggatgggtatggggttggtaaggagtagggaaggagggcaggggagggaagtgagagggaacctggattgacatgtaaatcaagtctgtttctaatttaaattaaaaaagaaaccttcccaaactcatggatctgtaggattaacatagtaaaaatggccatcctatgaaaagtaatctacagattcagtgcagtccccatcaaaattctaacacaattttttacagaccttaaaggacaattttcaactttatattagcccttatgaaatagagaccactaacttttaaattttttaattatagaaaccaatttttaaataaaagatattggtattattctcccccagcccaagtcctcctagatcttctccctcttccatctcacccaactttaagttcctcttaaaaacaaacaaaaaaaaaaacaaacaaaaacccaatccaacaacaaaacagagaaaagaaaagagaagaaaagaaaagaaaagaccaccatccacagggaaaaaaaccaccaaactgtaatcaaataaaaacatatgcaaaaactatggagtccatatgttggccaactactcctgattatgaggcctaccctggaggtggctcaatacccaatgactctccattggagaaggtgaatttccctctcctagtggatataaatgtcagttattagcctttgccttggtggctagattttcaatctttcattaatttttttaagtataacacaataaaatataacaaaatgaaacaaaaactatcacattgaatttggacaagaggcctctacctttaattgtctctaaaatatatacaattgtacagtatttcaaaaatcaaacactggttttgaatcttttctgtgcccaggctcttcctttggtgttgcatatctctgtaccttgtctgcccaaagtcaaacaaatgtcaactattagagcttttaaattgatttcaacgttcctgggcagtttgatctgcatggatgatggttctgaatctacaactgcctgaagtcattgtgtttcactgtctaaggggctgaaaatgcattttcttcttttcttttctattatttgttgctgttgatgatggtaactatcattatcaagacattgattggggaaggaaatactactgtgttaacccagttcatccttctgggactctcagatctcccccaaatcacagcactgttctttgtcacatttctgcacatttccattacaatatgacccagaacttatccctcattgtcttaatgaaggattcccacctccacacagctatgtatttcttcctcagtcatctgtccttcaatgacctctgctatattacttcaatgtttcccaagatgttttccagcttattccagggaaagtaaactatcacctttgtgggatgcattcatcaatacttcactatttttctagtatggggctcagcgaatcttatgacagccatggccaatgacaggtgtgctgtcatttatataccggtgttttattcatcaatcacgttacccactgtctgtgctcagatggtgataggatcctatatgacggaattcacagcttctttgtcttggatttgtgccttgcttcagcccctcttctgggacctaacatcatcagatatttcttctgtcacatgccccagctgatacatctatcctgcactggcactttctttgtacaggtcttgcttaccatattgacaatgttgtttggaataacaaatgccttagtatcatggctatgtttccatatccatcttgagtttcacatcagctaaaagcaggtctaaggagttcaacacctgtgcttcatatctgacaactgtttccctcttctatatctcaggtttgtttatctatttgaatttcagttctggtggttgctgcagctttgactgatttgctttcatgttctgcactatgatgattccatattgaattccttgattcacagtgtgatgaggttagaagacaggacctctattactaagctcagaaatatgtgtctatctgagagatttgtctacaagttaccatcatgtgcacatgaatgacacactacaagattcgtagagtttaaatggaggctcaatttgatgtagacaacaatgtcaatatgaaccaatggtcatcttgctgccacaggaatatttgagtcttgaagagtttgctttcactttacttcagaggtgacatctgcttccattagtctattcacaggtatttgtgacaattggtacagaggatgtctacagcctgaaaaaatatagagtttacactaaccaggtaatacctccagaaatgaccactctgatatgactgaatattttctaagacatttctcattgctagccatctaataaaatcttggtcacatcttttttctattcccggtgttggcgaaaacaaaaggaagaaatcatctatcaaaaaaagagtgcagggggatctgatgttttcaggtaggaattattaacatatctagtaacttgagttttgcaggtagagttcttgtcaatgtcaatagcagtaactaatgttgtactgtaaacacctctcattacattcagatgtggttttcttgatatacgtagccaaaggaatctcattaccaaattgtttttgatatttcaagacttatgaagacttatgtgatatcattgtaataagggccactgaagattatattgtaaaaagtggggtacggagctaaattgagaattctcaatagtggaatctaaaatgcctgaaagacacttatgaaagtgctcaacatccttagccatcagggaattgcaactcaaaacaactctgagattccatcttacaccagccagaatggctaaaataaaaaacaccaatgacagtccatgcttgagaggatgtggagaaagaggaacactctccactgctggtgggagtgaaaacttgtactaccactctggaaatcactatggcggtttctcaggaaaatgggaatcagtctatctcaaaatccagcaattccactcttgggcatataccgaaagaatgcacattcatacaacaagtacatatgttcaactatgtccatagcagcattgtttgtaatagccagaacttggaagcatcctagatgcccctcaaccaaagagtggatggagaaaatgtggtacatttacacaatggaatattactcagcaaaaaaaaaaaaaaaaaaaaaaaaaaaaaaaaaaaaaaaaaaaaagaaaagaaaagaaatcttgaaaatcacagacaaatggatggaacaggaagaaaacatcccgagtgaggtaacccaatcacaaacaagcatgaaacttcatccagcagctgatcgaaacagaagctgacacccacagctaaacactgagccatactcctggaatccagttgtagagagggaggagggatgagcaaaggagccaagaccatgctggagaaacccacagaaacagttgacctgacctagtgagagcacagagagcctagccataaagctggggaaccagcattggaccaaaccaagccctctgaatgtgagggcttgggcagtctatgggacctcgaacagtggagccagagtttatctctagtgcacaaatgcactttgggagcccattccctatagagggataataatgcatcccagatgcattaaagggggcctaggccctcccccaaatgatgtgacagactttgatgatcccccatggaaggccacactatccttggggagtgggtgagggatgggttggagcgttggtggggggcatgtgaggatgggagagtgagggaatggggggattgatatgtgaaataagattgtttctaaaataaaaatatgttgtactaagatatatgaaaatatttcaaggcttatcaagacttatacgatatcattataataagggttactgaaaactatattgtattgagatatcggaacaactaatgtgaggaactagtataccttatttcttaccacctgtatccaatgctttgtgttctagagttagaaggtgtgtgagatgatagagcaggttgaaatagaatagttattacctacatgcttatatctttgaagaagtttcacaattcatagatgagtaggcagaaatgcaaattggcttctctctagtcgattattcgtattcaggagaaaacataggatttgtgatcctaggtcttcaattaaaaacaggactatgctgtggaattagtaacaataatgccttgttttgctagttcatcaagacctgaacagacttatttaaaccaactctcatgaacacatggtatctgtagaaatttgttagagtcttagtgttgtctaggggagcaaggctaacaaaaactaacaggtgaaaccatttggcaagaccataggtgaagaaatagtcaagggtttacacatggccaggatagagagaacggggcatgtagaacatgtgagagaatgaagtttcactccatgccaaggaaacaattcaatatgaatagaagacatgtggccaccattcaggcatattcttataagcataatgctttaaagatggataaaaattcatgagaaatctatttctggaggactctaggagcttcagaaggatgcatacatgtggaattcattagagaacttgtcttaaatattgcaaagatctacttccattttgtctttattttcttttaatttttggattgctacaagaacattacatatttatgaagtaaatcatgatgttttggtgaaggtatatactgaataatatccaaatcagagcaacttttatattcatccaccataaattactgaatttttggttttaaaaaatcacatattcaaaatcctgctttcataatggaagagaaaaaacaacatctgcatttttctgaaatgcagaaactgtggcacaaagtataataggaggtgtgaacatgagcaaagtataataatacacatatatggaaatgtcataatggaacccatcacttttgtgtgctaacaaaagcctaattaagaagctcttacttgaaactgtttttgaaatatacaatacactattgatagctttattcagtctaccagaaataactcttaatgcttatgaaaactatgcccaatctcattcctgccccaccactccctcccacactcattctctgatcatcactcaatgtctgtgatatcaacttgtttggtttccatatatgagtaaactcatttagttgttttatttctatgtctgtatttttactttatagaacatctactgtgcccattcatattgtcacaaatgatcacatttaatatttgtaaagactgattctgatgcatacatgccctgaacttcttagctagtgaacagtgcctcaatgaacatccaactgcacatttttcttgcacgtactgattttcttcttggcttctataagcagatattggggttgctcggtcatatgagtttcaccttattgagggatgttaataccgttttttcaagacccacaacattaatacccacctactatatttagaacgcatctccacattctctctaaattgttccacacaagagagtttttaaaatgggggaaaacatgtacaaacattttgaaaactatgataagaatttaatatcatcggaggtatgcaagttaagtcaaaatcaactcattctagttagaatgagaattatcaaaaaataaaaaggtgtgagaacgtggagatgcattctatagtaaacaaggaggacccgaagagcgacataaatggtcccctggagaaggggaaaggatcaagatcccctgagcaaattgggagcacgaaaagaggtgggagggagctaggagaatgagaaggggagaagaggagggatgcagaggacatgagggagcagaaaggttgagtcaggggaagaatagaagataacaagaatggagataccataatagagggagatattttaggtttacagagaaatcagacactagggaaatgtctggagatctacaaagacgacaccaactaacaatttaagcatcagcggagaggctacctttaatgccctccccagataataagattgatgactgacttatatgctacccgatagccctcatccagcagctggtggaagtagaagcagacacccacaactaatcactgacctgaactggaatccagacgcagatgagtggagagcaaagggatccagtccaggctgatgaaacctacataaacagctgacctgaacatccaggaactcttgctccctagactgatagctgggataccagcatgggactgatccagacccccaagaacatgggtttcagtgaggaaaccttggaaatctacgggacctcctgtagtagttcagaacttatccctagcatagatgtggactttgggagcccattccacatagaggaatactccctgagccaagacacaggggtgggcctaggccctatcccaaaggataccatagactctgttaaccccccccctacggaaggcctcactatccagggggagcagaaaggatatgtgataggtagggttttagttgggagggggtggtaggggaggacgggagggacaagggatctgggattgtcatgtaaaacaatcttgtttctaattcaaataaaaaaatctggaaaaaactctagttggaggaatttagctattaagttgttcaagttacttacatattttagataagctccatttgtcaaatgtattacttaaaaatatcatcccccattctgtaggttgtctctgaatctgttggctattttcattcctctatgaaagcttttcatttacagtgattcagttaggttggtttggagtttttgtccttgattttgagatttaattgattacatcctcctagaccaacatcctgaggcttttcctttgggtcttctgatggtttcatagttgactctttaatacattgtgagttcattttgtgcatgatgaggcatagatttctaaatcatttctgtgcatagaactctagtttcctagcattgcttatgtaagtgagccatagtatgttcctggaaaatgtaaaaagtaagttggctgtagatctgagaaagctgccccataataaattgcttacttagcaggtatggggactcaggttcaatctctaggggaaaaaagtagaagtagaagcagatacccacagctaaaccttgaactgaactgaaatccagatgcagagaaggaggactgatgagcaaaggggtccatactaggctggtgaaacccacagaaacagctgacctgaacaagggaaaactcttggtccccagactgatagctgggaaaccagcaagggactgatccagacgccctgaatgtgggtgtcagtgaggagaccttggaaatctatggggcctcttgtagtggatcagtacttatcgctaacattggaatggactttaggagcccattccacatagagggatactccctgagccaagacacataggggtggaccaaggccctatcccaaaggatatgatagactctaatgaccccctatggaaggcctcaccctccctggggaacagaaagggtatgggataggtagagtgttagttgggggaggcaggggaggaggggaggggaaaggacctgggatttacatgtaaaataattttctttctaataaaaaagtaatactttgtgtacatagatttaattcagaattccccatcctgctcagtcaccctatatactagttttttgtttgttttgtttataaaagaaatttattttcattcatgtatgtaccttcctcactgtcaaatgtagtgcaatgctcaaggtggccagtaaaagacttcagatgtcgtgaaactggcattgcaggtggctgtaaggtgcttcctgtgagtacccagaggacatgggtcttctccaagagtagtttaagaccctggccatattttcagtctcttttatatttgtttttatacaagtgccatgctcttactatagttttatagtacagttgaaatcaggtctcttgatacctaactcattttacatgatactgctttagattttgtgattttgtatgaaattttggatttacttttgataatgttggacctctattccaacataagatttttaagattatacttctctctgtgtgtgtctctttttctctctctctgtctctctgtctctgtctctgtatctgtctctctctctctctctctctctctctctctctctctctctctctcacacacacacacacacacacacacaccatgtgcatgaaggagttagagaacaatttgttcttaccttccactccatgggttcaggggaatcaaacccaggtcttttggcttagctgcaaatgcctttacctccagagccatatttcgggcccccttggatttattttttacattgtgaaaagtgccatttgtattttgagtcattagattggttagattacatgatcttttttaaaatattgattcttaaaatccatcaacatggtatatctttctattatttgtgtcattttcactttctctatcagtgtttgataatcttcatctaaagacctggcactgaataaatttattcctacatttcattttgttatcaagacaagatgtagatatgtaccccatgctgaccttgaactcatgatgtccctacattaacctcctaagagaaggattacaagaatgtaccaccataactggtgcttcctaggtgttatattttgtgttgggtgattatcattacagattgctctcttgatttctttatcatagagtttgctattaggctatatgaacatgaattactttttagtttgaattcatttatcagatctttgagtttgagttggcatcttcagagtttttaaatgtgaaatcatggcatctgtaaataggggcaattcaacttcatccttattaatttacatgctttttatttcttctcattcctaattgctctgtctaggtttttgaatgatatcttgaatatattttgggtttttgcctcattcttttaagtgtgatgatagctgtggctatgtcatatatggactttactgttggggtaagatctacacctaattaaaaattattataagaaaatattgaatttgtcaaatactttctctgtagctatccaagtgttcatataccttctctcctccattctgtaaatgtcatgcacagttgatttgtatgcagttagccgtccttgtgtctatagattaatcctacttcattgtgatggctaatatttttgatatgcactgaatttggtttgatagtatttttacagctatgttcatcattcatagtaatctaagcttttttcatctgccatatctttgatggggttattaatagtgccttcattggacaggttttgatggatgctctcctcttgaatttcttgatgagttcgagcattttgagactagttctttacaagttttgtagggtgaagaagtaaataagtcaggctttgggctcttcattgatggagattttcatttcaatatccttacttgccattgtttctttacatttctatttcttcaaaattcagtctcggtggctgtattagtctggaaacttctttatatcttctagcttatatttcattgttgtattatttatattctcttgtgatctttggcatgtttgtagtgttatttgtattgtctcatttttcatatctgcttttatatgtttttgttccttatgtaatagcttattaatcttatcttttaaaaaattcaacactaattttatgtttatataattgtataattttgtgtgtagcttatatataaacacaaactattaatagaaaaaattaatgatattttgatataggaaagcattctgtaatatatatatttttacatttgccaccttgtactaaaaaatataaagtcctttctagacttgtgaaacagatcctttatttctctaacctccatttatacaccttgtatttactgtttccttcagtggtgagtataagtttgttattatttttcaagttcattaactcatgataaaatgtttatttgatactattattctgctgctactattaaaatgactactaatgacttattgctactatagatggtaccatgtctcaactcttaacagagaaacttcttgcagtaaatgacaattaatagagaccctcaactaatcaacatgaaagaataagagactgtggaatcagaccctaggggtctgggctggcaagaggacagacatcctcaagcacacctggtaccataaggtaacaggaaagtgggttccattatgatgagcaaaaatatggtggataaataggaaagaaagagaagcagaattgattcaggtgccatggaaagagaagtgaagaggatgaggagtaggctgatatgggaggtctacttgctacccaaggccatggtgatgtcctggctcaggatgctgccaaggaccatatctgggtccggagtactagtacagccagggactatgtggacatgtgtgatccatggtgccaacaaaggacacaaggatgctcagtgtctgggctgccacctgtggccatgtaagtgtctaagagccatgccaccacttgagatacacttatctatgttgctttcccatcagaggctgcttctgaatcaactaattaatattttaactaccttctgtatccgcacgtccccacagtcagaacccctccattcaggccatggcctggatagactttcagtcccaccagcaccagctccaccattgccactaaatgtctctatcattctatttaccaataaagacttggaagtcagatgttgggttgaaaacctgctctctgagaaaggccaagaaacaacagcctgaccttcctttttgtctggagacccagcaaggaagtgtctctccagctgtttcaaaccaaaatgactactccttcctaggcatctctctgtcttcctggcttctctgtactcttctatggctaactcctgcaaactagttgctggctccaccccttaaaccaaagttgattttattaatacatttcaggtttcacagtgcaatcaaatatcctgcaacagatttgggtaccttgtgccgtttggaccattttgtcacccaaacctgggctactgctgaggaccatgtttgggtccatggttctacctcagccagggtctatgctgaagcttgtagcacatgttgccgccaggggcaggaactattaccgagataacccagtttatcatgctggaattctcagatatcccccaaatcatatcattgctttttattacattcctgctcatctattttacaaccctgacatggaacccatccttcattaccttaataaacattcctttatgtatttcctcctagtggtctatcctttataatcctctactatgtcattgccatggttcccaagattctctccaacttcttttaggaaaagtaaactattggctttgtgggatgcattgttcattagtttaccctttccacaatgaggctgagtgaatgttgcctcatgacagccatggctatgacaggtatgctgccatttgtaacccactgctctattcatcaatcatgtcacccaccctctgtgatcagatggtgctgagattctacatggctggacttataggttccttatctcagatgtgtactttgtatgagttttcccttctgaagacctaatgtcatcaggtacttttactgtggtattttccagttgataaatttatcctgcagtgatgttatctctgtatgaataccaacaacaatctttgaggtagcagaatccacagctacaatagctatgccaacttattcatcatgaagatcacatcaacaaaagacagaaaaagaatgcattgttgacttgggcaaaattagaacattaacattttgatgttatctatcttctccaatgaacactggaaaagaaaatatattccactgccttttgtgtaaactccagcatttcttatgtaaagaaactctccccgggagggtggtggtgtttccagtgcttttcctgcaatcctgacaacctgagttctgatgatcagtgccagtttaaagctttgatatctattcccatctgtaacccaaggagtggtagggggaaagaagatggactccaggaaccatttacgtaagactgtgagctccagagtcagtgaaaaataattggtctgatttttaatgacaataaaatacacactgcatttttctcttagagtccttcttgtttcctagtttatttggtgaagaggattgtaggctggtaatcctttgttctacatctaaaattcatatatgagtgagtacataccatgtttatctttttgtgactgggttacctcactcaggatggcttcttctcgttccatccatttgcctgtgaatttcaagatatctttgctttttttctgctgagtagtaatccattgtataaatgtaccacattgtctctatccattcttcagttgaggggcatctaggttgcttccaggttctggctattacaaacaatgctgctatgaacatggttgaacatatgtccttgttgtatggacatgcattatttgggtatatgcccaagagaggaattgctggatattaagatagactgattcccatttttctgagccaacactatactgatttccagagtggtcttacaagtttgcactcccacaagcaatggaggagtgttcctttttctccacatcctctccagcatagactgtcattggtgttagggttttttgttgttgttgttgttgttgctttgggtttttttttttttgccattctggccggtgtaagatggtatctcagagttgttttgagttgcatttctctgatggccaaggcatgaaccccagagaatatgaaggggcaggatctcattagctaattgggagcatgagggtaggggacagggagctgccagaatgagaggaggagaagaggaggggagaggaggaaatggaggaccagaaatgttgagttaggggaagaatagaggagagcaggatgagagataccatatcagaaggagtcattataggtccaaggagagatctggcactagggagatttccagagatctacatggatgacaccaactgacaatctaggcaatggtggagaggataacctaaattcccttcccctataatgagcctgatgactactttttatggcatcctagagccctcatccagtggctgatggaaacagaggcaaacatccacagatatacaccgaactgaactctggaatctagttgcagggagggaggaatgaagatcaaaggggtcagtactaggctagtgaaacccacagaatcagctggcctgaacaagggggagcacatggacccgagactgctatctgggaggccagcaggggattgaatcagacccctgaacatggatgtcaatgaggaggcctccgcactctaggtggcctctggtagtggattagtatttttccctggtgtaagaagggactttgagagcccatcccacatcttggcctggacccatggaggagggcctaggcctggcccaggatgatgtggtggtccagggccctaccctgcctggggagtggagggtggatggggtggggggcaggtgggggttggggggagggttgggggaggggagggagaagggattgacatgtgaagaaagcttgtttctaatttgaactaaaaacattaattacaaaaaaataaaattaaaaaaataataaaatacacactagaaaaaaaagaagaaaaaaaacagtggtatcaagtggttagggggaaatgaagatctatttgtaggataatgaaaccagatgcttatgtcacagcctacacaaagatcaactccaatgtctgaacaaaaaacagaaaactgtgaaactattacaagaaaaggtggggcaaacactacatgatattggtataggaaaagtcttctttttaaattttatttaatttagaaacaatcttatatatcaatcccatttccctctcactcccatgctgccatttcccccaaccctccccatccgacctcccatccccccacacccccacacccccacacccctacccccacacccccaccccacccccccaccccccaccccacccccgagagtgaagccttccatgggggttcatcaatgtctgtcacatcattgagggcagggcctaggccctcctccatgtatctgggctgagagagtatccctctgtgtggaataagctcccaaatccatttatgcattagggatgaatactggttcctctgtcaaaggccacatagactgtccaggcctcccagttgacacccacattcagagggcttacatctattcaatgctggttccccagatttatgtctggggtccgtatgctctcacttggccaggtcagctgtttctatgggtttttccagcctggtcttaaccccttttctaattcctcctccctctctacaactggattctagaagtatggctcagtgcttaactatggttatctgcttctgcttccatcagttactggatgaaggctctaggatggcatttaaggtaatcatcaaactcattataggggaagggcatttaaagtagcctctccactattgctagattcttagttggggtaatctttgtggatttttggacattttcctagtgccagatttctctttaaacctataaaggctccctatattaaggtatctcttttcttgctttcttctatttttgccccaatactcagtcttcctgatccctcatgttctcctctcctctcctcttctccccttctctttttcctacctccctcccacctcccccaagctcataatttgctcaggagctcttgtccctttccccttctccaggggaccatgtctctcagggtccgtcctgtttcctagcttctctggtggtgtgaattgtaggctggtgatcctttgctctatgtctaaaatccatatatgagtgagtacatactatgtttgtctctttgtgactgggttacctcactcaggatgttttcttctagttccatccatttgcctctgaatttcaagatttcattggtttttttttccactgagtagtactccattgtgtaaatgtaccacattttctttatccattcttcagttgaggggcatctaggctgcttccagtttctggctaatacaaacaatgctgctataaacatagttgaacagatgtccttgttgtatgaatgtgcctcttttgggtatatgcctaagagtggaattgctggatcttgtggtaggctgattctcattttcctgagaactgccatactgatttccaaagtggctgtaccagttggcattcccaccagcagtggagaagtgttcccctttctccacatcctctccagcataaactgttgttggtgtttttaattttagcattctgacaggtgccagatggtatctcagagttgttttgatttgcatttccctgatggctaaggatgttaagcactttcttatgtgtctttcagctattttagattcctctattgaaaattctctatttagttttgtaccccactttttaattggattatttggtgttttggtgactagtttcttgagttctttgtatattttggaaatcagccctctgttagatgtggggttggtgaagatcttttcccattctctggggtacagttttgacttgctgactgtgttctttgccttacaaaagtttctcagtttcaggagatcccatctattaattgtggatctcagtgtctatactagtggagctatgttcatgaattgatctcctgtacaaatttgttcaagggtacctgccactttctcttctaagaggttcagtgtagctggatttatgttgaggtctttgatccatttggacttaagttttgtgcatggggatagataatgatctatctgcaatcttctacatgccagcatctagttatgccagcgccatttgttgaagatgctttcttttttcattgtataattttagcttctttgtcaaaaaatcaggttttcgtaggtgtgtgagtttatatcagagttttcaattggattccattgttatacctgtctgttttttgtgccaataccaagctattttcattactatagctctatagcagagcttgaagtcagggatggtgaggaaaagtcttcttaaataggactctgattactggagaagtaaagccaacaataaataatgagagtgcatgaaactaaaaacctttagtgtaaaagaaactttcaacaaagtgaagaaacagcctccatgtaggatgagaaaaaaaattttgtcagatacattcaacaaaggattaataccacaaacccacaaagaactagaaaaataaaagccaagtatcaccaaaacaggcaacccaatcaaacagtaggctgccagtctcaacagggagttctcaaaagaagaattctcaaaatacaagaggctgagaaatgttaaataccaagccagctgtaaatctcttgattataatagcatcctacctgcaagatgggctaggacaagagtggcacaaagctgtgggagtaaccaaccaacaactgatttgaccaggcctattcaaaagatgggacccatacccgacactactttagtgacaaagaacctgagactagaagcccagatacctaggataaaatcaaataatactggactaaagaaagaaaaggaaatgaagtgataaaattattcctaatgatattctactatactcatatatcggtgccttgttcagctctcagtgagacaaactaaagcaggaagtaactgaggaagtcccaacgtcaagctcagccctccctacaaaaatgaatgtagcataacactgataattattgtatttataaaaaccaacatttgtaaattagaataaaaatgtcaactttttagaggatggcacattaatattttaatatagatgtaccttatgaaaagaatcactgattaatgcacaaatggttataccattctaaaggaaaaatgttttgatgcattctctctctttcacacacacgcacacacacaaacacagcaaatgaaccacttgaaatggcaaacactaaatataatagatgactcaagagatgttcacctctcacactagcatcaatcaataagcacatgatatatatttgtaaacaattctttctctctcagcttgccttactgccttggagccctttgaactggagggaacactgggaaaaatctaatctcaagttttcagtttcaattcccaactgcaaaacctgaggcaagagagacccaagacaacacagctattcagtcatgtagactgacaatgataaaatggtacatgtgcacgtcttttcctcaatgcttggtctcaatccaccataacagtggtccttcaaagcagatgtgctatgattttccatgcatgggtgaggaaagcaaggctctaaggaacatgactggaccaagtgaacagagcaacaacttatgattcaaactgcaaggatcttaaattcaaattgaagcctgtctctgatgcttggggggttatatgaccttaaccaaatttatttgttaaagcctaaagcctaactaatttctctgtaaaaattagctaagggtactaactaacttgcagtatagatcagtaatacagcagtgtatgagtgtgtgtgtgtgtgtgtgtgtgtgtgtgtgtgtgtgtgtccttggcctcaccctccagcaccacaaaaaaaaaaataaaaaagcaaaaatcttcccttttcctgtttaacacagacatcgttgatttatagatggctctttgctctttatattgtctgtcttccttagcatcattatcatagtaattaaagttggcataggagacaaaatgtatctttactcttctggatgcatcaattataattataggattaatctcataaattcccccggatctcaattcagtatcaaaacactttcaccataattggctttactctgtcaacttcaggatcccctggttattttcgaatcctacaagagaatgtttcttgtggcaaagagctgttctttgcctattgtgtacacagtttgagcacattattacacttcattccctaaattgagaccatttgcatgtatacaaggaatctcagaaactctattcctgtatattgaatgaatgatttcagaacaagcacaggtaatttgatttccatgaaacagaataactgtttttaagacatatagatatagatatattttgtgtatgactgtttgcctccgtgtatatgtactatgtgtgagcttggtacttgtggaaatcagaagagggcatcagatatcctgagggatataagctgccatatacatactgggaattgaacatgtgttctctgaaagagcagtacccactcttaaccacttagtcatctctccacccccaaataaactcttttgtctaagttttgttgctgaagaaaatgggaagaaaaaggaaaagagaaaggaaggaaatctatcactcaaactatgaggttttcagagttccagggatccttttgagatagttcaatatactcagtcctagcacacttaactgacttacccatggtgacccaagtgggcagtgacagtgacacctagacattaaaagttaaattaattgttttcattccaatgaaagtaagtcacagtaataagtcatttgatgctagagcaatggttcagtgattcagagcacttgcaaagcacctgtatggaagctcaaaacatctataactccatttcttccaagggatccaatgccttcttccgatctccacagacatttatgtagtacataagcatacatacaggcaagcattcatacacataaaataagggacttttaaaaatcaggtataaaggaaagacacttcttgatcatgactcgagagacagagttcttcatgttattactttccatccctggagtgatttctatttattaagcaccgtgtgaagaagactttcttattcacatcttatataatgacctcaacaccctttggggcagaaattgtgtgtgtgtgtgtgtgtgtgtgtgtgtgtgtgtgtgtgtgtgtgtgtgtatcacttttataaatagagaagctgatgtttaagagattaaacaacttcacatttatttttgttttatgttggtaagagagcacagttagacttttatctcaaatatctcaattggaaatttgttcataaccactatgttttagcatgagtcttaagatctctgtctggggagtttatttccaactaaggactacctaaagtgaaattctgtcctttaacacaagagaaagtcttcttggacccaaagaaaggaattctcacaggagaataaggtgggagactttggtaatgggcagccagccccatcaccattactccagaggacaattagtattcagaagatgttagtttaatgactgctcagcttcacacattggaccctggagtggctgcagtgggcagcctctgggaggcagaggagggctgtctctacccattaaaataacaaactcccactagtcatttggaaactttagtgacagaggagcagccattccataagtacgcacttttgtttacataaagtcagtgtatattttttaatgatggaatcagaaatgaggcacacagcagtgggaaattcaaatgaacagaagattacagaagaggtcacggatgaaaagccactgacaccatctcttgtggcacagatctcaagatacttctgcctaaagaaattcagtaagtccttacttcccacttcagctccacaaaatataacatttcagcttatcccagctctcatctgtaaaagggcagagaaatactgccaagtcctaaggctgtataggtcaggctttgtgcagattgagcccttgcaacagttcctggagcttagcaactattaaataagtattcacaattacattatgattgttattgtatgtcaacattattgcttgtgactaaaaatatattatatattttattatgacatgccaggcataataaccgacaggccactgggctgaactgaggataagcagtggaacacatttatccactccatgaaatttgtcaaatgcctgtgacttgagggaagattcaacatcttagaataccccaggtcagaaacagatgcaatgtgggcgacaagaaacagcctagagccatgcttggacagaagcaagcatggacagtcaaataccataggagtgagtaaatatcaacaacttggactccaccaatgaatcatagcaatggcccttaagcctttttagacacgcttctatgttcattttgtcctgacactaccatcagcctgcctttcttaattgccgagtgtgcacagacttacctcatgtgtttagaatgataacctgatctggctgaggatagccaagctgaactttgctgatcactgtcctaacaaaccctctttcttccagcttctttcctctgggaaatcccagagcctggcacttcttgacccacagctaagccaatatcagtcacttctggaattttctctcccaactcacagaaagttattcatagcccttccatcctgtaatctatgatggttaaattggtcaaatccaaattttcatctttctgttaattctgtgtcgtgacttgtaggaaaacttttaacaattttcaaatcttcaggtgtgtgtgtgtgtgtgtgtgtgtgtgtgtgtgtgtgtgtgtgtgtatttgtcttggttttgtatgtggaaaaataaattgttaaactatgacttggatttcaggcccctcccacatacatagatatacttcaaaaaatatagtctctcttattcatttccttgtcctagagtcatattaaatatatataaagcatcaaacaatcaactttatgttaccttactctggcttatatttttaagcagaaagtctaaaatggccacagaaaacttaattccaaaaggacctgaaacacagctgactcaaacatgtctatttttgcatctgataaagtgaagctctggggaggtgaagggctttccacagctccttccactactggaaagttgctggggacaaaattctgttttctcacttctagtcggttttttactccattagactttatctcttttagtcaacaagacatataccatacagattttaagtagtgccaacaaaattatcttagggtgacaacttgtttgtccagatgtctgtctggaattgttaactgagtgttagtagtttctgtgatcttccagacatctctctctctctctctgtctctctctctgtctctctctctgtctctctctctctctctctctctctctctctctctctctctgtgtgtgtgtgtgtgtgtgtgtgtgtgtgtgtgtgtgatacatgtgtgagaaggtgtgcaaagggaacatgcatgtgaaggctggaggtcaacacaaagcatattcactaatggctctccacctgattttctaaacaagagtcttttaatgacctctgagctcactgactttgctgctaccctggttgaccagagaactccaggcatcctcttgtctctgccctaccaacccaagccccagcgtcaggatcacaggcatgtatggatagacttttttcatagctgttagggagccacactcaggtcctcataattgtgcagccatcttactggtgaagtcatctcaacagccccatgttttgttttgtttttattttagacagagtgtcgtatgtccagtgttggctttgaactaactacatagtcatgatgaatttctaatccttttcagccaacattcccagtttatgtggtgctggggatcaaactcatgcctttatgcatgccaggcaagcagtctatcaactgagttacatctccagccccaagttgttcttcttaaagttacaaacacatacctccctaaactcaggattatcccttcttttaagcaggaagcttgcctatggctggaggaagaaacaatacagctgtgaccagattcatcctcctggggttttcagatcaacctcaaatgaagatcttcctttttatgctctttctgggaatttacctcctgaccctaacctggaacctgagcctcatcaccctcatcaggatggacactcatctccatacacccatgtacttcttcctcagtaacctctccttcctagacatctgctattcatcctccaccacccccaagatgctttctgacatcatcacagatcagaacaccatttctttcgttggctgtgccacacaatactttgtcttctgtggaatggggctgactgaatgcttgctcctggcagccatggcctatgaccgctatgctgcagtctgcaacccactgctctacatggctctcatgtcccattctctgtgtttgaagttagtggttggtgcctatatgggcggcttccttagttctctgattgaaacatgttctatctaccagcacgatttctgtgggcccaacataatcaaccacttcttctgtgaccttccaccagtcctggctctgtcctgctctgacatcttcaccagccaggtagtgaccttcattttgggtgttgttgtgggagtaatgtctgtcctagtggtcctcatctcttatggatacattgttgctgctgtcctaaggatcggctcagctaaaggtaggaccaaggccttcagcaccagtgcatctcacttgactgctgtgaccctcttctatggctctggtctcttcatgtacatgagacccagttccagctattccctcagccaagacaaggtggtgtctgtattctatgctgtagtgattcccctggtgaaccccatcatctatagcctcagaaatcaggacatcaaaaatgccatgaggaaggctatggaaagggactacatgctttctcaagagcactcatttttctgacactgggtggtgtttgtttacatgaagatctgagcagatcaatgttgcagaaatttgtgtagttttgactacttgatcttcaagatgacttgaatgatttgtaagataaatagcatgagtacattgaggctccaaatgttctctctagtagaaaacctcaccatggcaaaatagcattctacgacatcaaaataccacttgtctgtactttagatctgaggacacgagaaattgagctggaactcagatagaagcctcctccttgccagctaccatcaatagcaccagagggtcatatataggctgttaggaaggaagtcatcctaacatcctaatatcacctagccatgggccttgcctgatgcaatagccaactgcttggtaatacatgctcactggaccaatagtggcatgaatattctagaggtaacctataattccctggttggatctaaagcctgttttattggagggaatatatgcacctggtactataaacatgacataaaacctgtggctaaggaggtcacacactttgtgggagtctactgataattcactattgataaatggatgtgtagctctgggcatggtgtcttatgccttaaatcccagcactttacacagaagcaggctgctctctgcaagttcaagaccagcctggtctacaaagtagattccagagcagccaaagctacacagtgaggctcagtttaaaaacaaacacaaaggtattatggaaactgtcttccaagtatatatgcttgtatctttaaataatgcagctcttggtcttggtttgagaagcctcttttattagtggaaggagattaaacagagactcatgactgtccaaggtgctgagtataagtgacttttgagtactcaactttaaatggagcatctatatgacctatatcccccaaggttcgggaaataacatggacaaggagaagaaagaatgtaaaagcatgagcatgggggtgaatgctatgaaattctatcttctagaaatggcatggctattgcactcctgaattcacagcaactttggttacctgcacaagatctgcaggagatggagtcctccaatgtcccatacactcctagcttaagatcattggaagttaatggttcctgagatagagggggtcacatttcttcatttcttcattgccctctggtaagcttcctatgatccagtaaacaacttcacagtcgtgcaaatgcaatgaacccctcttaaactcagtgggttatttaaaattgaaacaaaaaacatgaaaagaagagcaggaagtgtttgaagagtaatatttccagaaggaatataagggggacaagagaggataatggaaggtgaatatgatccaaacacattatatacttggagaatttttcaaggaaaatgctaggttatattctttaaagaaatagattattttatctaaagctttcatacttatattcataggtacttgtgatggttagggttctttttataagtttaattattttattatctttaattataatctaaagtgtgtgtgtgtgtgtgtgtgtgtgtgtgtgtgtgtgtgtgtgtgtgttggcttgttttaaatgtctttaatacagcctagcaccacatggcaagagaacctgaaagaagaattgcttagatccaggtggtctctgatcatgcctctgggagacagtcttgagtgccttaaatggggcatgaatgtagatagcaacatttcatcaacagtgctttgtgtgtgagtgaagagagcaggaagcaagcaagcaaataagcatgcattggttctctctgtctcatgaatatagatgtgatgtgactagctgcttctgctcctctgttagctccctcaaggatgtaactaggaattgtaagcctaataaaccctttcctccctcactgctgatttttgcttccatcttttatcccaggaacagaaatgaaactcgaacataaattggcactgaggtaatggagctgttcctgtgataaaactgaccctgttgtttgggcggaggaatttaagagactctgcagctttggtctggatgctattggaaaagcctactgagccattttaatgaaagcttggaagacagtaatactgagagtaatgtgggcatggaagcccagctcatgatgtttcaggatgacaaggacttcactagaaattgggctagggaccattcatgagatattttggctaggaatatgcatttgctgatcaggctgaggctagagaatctgtgtggttaataaaaagtatgtactattgaactgaaagttgtacttcattgggacaacaggactaacatgcagaaactcttccaactgtggtccaaaagagctccgcctggctatactaggagcttacagaaaaacttggcagtaatataaaagatgttcacatggtactggtgttacaggaataaagtgatcatggagagaagctgaggcctggcactgtgtggcaggtctagagaccctgtggagagacagtaggaaatattggtgaaagtgaggactcaattgcagtaggcaccccaggatactgagaggccaaaaccatggttatctcccaagggcagctgtgggtgtggaacagagccaggttaagaaggaaactttgtggtgggaagggaagagctggggaatggagtcaccaaagcccactggagccccgaagatcacaagccacagataatcaaacactgaacaactaggtttggtatttatactgatgggttttggtttgacttatgcatgactgttcacttactgtgccccagttctccctttttggaacaagaatgtttcagtggtaactttatttttttagttaaaattaggaacaagcttgcttcacatgtcaatcccttatccctctccctctccctctccctcccctccccccaacccccatctccctacctcatccccctccactccccaggagggtagggccctccatgggggctcccccaaatccaccccttcatcctgggcctggcctgcgcccacccccatgtgtctaggctgagagcatcccttcacatgggatgggctctcaaagtcccttcttaaaccagggaaaaaatactgatccactaccaggggccccatagagtgccgaagcctcctcattgacatccacgttcaggggtctggatcattcccatgctggcctcccagacagcagtctggggtccatgtgcttccccttgttcaggttagctgtttccatgggtttcaccaacctggttccaacccctttgatcttcattactccctctctgcaactgggttccagagttcaattcagtgtttagctgtgggtgtctgcctctgcttccatcagaagtggtaactttttaaatttattttatagaagctcatggttgagagactttgggatttttaatatttttcactcttgaagtgttggaattgcataagacttttggagttttctagactgtgactttattttgtattatgagagtaatatgagactttggagacaagggattaaaaagttatggcttggcatgatatgtttgtgtgtcaagttgacaaggtctggattatgaaggataattttaaatgtcaacttgccatagcctagaatcatatgggaagaaagtcttaatgaaggattgcctagatcagagtgatccatttgggggattgtcttaattgccttacttgggatggggaaaaggaccctgaatataggtggtaccatttcatgaatatagaaagcaggacaaaacaggcaaggatccctttgttccctcttcactctgggatgtggatgtgatgtggcaatggaactgttccttcctggacgtcccttcaatgataaactgtaatttgggattgtaaaccaaataagctcccctttgcccctttattgctttttattatgttttaccaaaccaacaaaagtgaaattagaacaatacttgttttatatcattctaataaagtggtcctctgtaagtaacatgagagcaaataaaacacaaaagaaacaaagaatcttctaatcattaataaatgggactttttcaaacttgaaaaagattcagcctattccatgttctatgaagtacccagtgtatacactgagttatatttaaaatttactgtatccttttgaaatattttgatggaatattaacacaataaaagggtcagagacatataaaggcttttgttacaaattacctccctgtaaaattgtataattttcatttatatatttatttgtctttccattttgttgtaaataatagtgcagttggctttgcaaattgcaaaaatgtatatttacacttttaaaaattatttgaagatctgaggataaattttaattggcaaagtgtctgccatgtaagcatgaaagcctgtagggagccgtccctgcattctccattacaatgatggcgcctgcaggcactgaatgtaaattattgcgcaggcgctgggtaattttccatttccttgatctctgcctattccgtggcgtcatatggcctgaggagctgcagccaatcatagggtgacacgtcccaggcagcggctgccagcctttattaggggacgggattcttggctcggggtctccgctctggtaagcttatgctctcctctcaagacgcattaaagctttcctgcagaaggatccgaatgtcctgtgtggttcttgctggtgagactattgcgcgggacaaaagcctaagtttgagcctcagaactcaagtaaaaatccaagattgaacatcatcctaaaacaaacattctcactaaaatcagtaacaagacacaggtgttaattctctcccttcttattcagtgtattgcctaaaatcctagcaagagcaataagacaagagaaggaagttaaaggaataaaaatagaaaagaaaaaagtcaaagtattcctatttgtacatgacataatcctaaagacaccaccaaataactcatacctgataaacactttcagcaaaatggcaggatacaaaattaattacaaaaaccactaaccatcctgtatatcaattacaaacacactgagaaagaaatcggggaaacaatctcatttataatagcctcaaaaaaaaaaaaaaaaacccttggaggaaataagagcctctataatgaaaactttaaaataatgaagaaggaattaaggaagacgctaaaaggcgcaaagaattcctgtgttcatgagtttgtcagaagcaacattgtaaaaatggctattgaaccaaaaataatctacatgttcagtgcaatcccatcaaaaattatactaaatgaggtaactgagacccagacagacaaatgtctcacattctctttgaagatcccagcttcaaatcttgagatttgtgggctttaatggaatacttgtagaaaatagggctccaaaaaaggatcatggcttgaatacctcaagggacagagcacatcagatcacaggtgatatggaaacaggagaataccaggggtgtggaatgattaagaaggcatggatagaggtgatggaggaggaaagaggaaaaaagggagtgctaaccccaaaatggagtatatgaaaatctcatatagaagcctattactttgtaagtcaactaaaatgtatataaattagaagggtgataacctgcatggataaatagtgaaaagcctggtggtctttcttcagctgtatgtgttcaaatgccttctctcagctcctgtcttatgtttacatatttctataacatcttttggtagaacctagatttaattttatttgattataggcttatgacccaccatgatatgtattgtttatactaaacaagagtgtgaccaaaataacaaaatctactagaagcatacacaccatgagttcattactgtcatacagactttaaatgcactatcatgatgtccctgtacttttacagatcagaacaaaaggttcctagaaagatggtcatttgtcaagttaaacatgggacccaatctccagattacctgagtttgacaactgttcactccagcctcactgatatacccccagggaatgagttcttctcatctttgtggtaccaaggtgccaggcacagtgcttaatgtctcataagttctgggaaaatgttaaatattttaatgtattgggctttgaaagtgaacagcctaggtgtccatcagctgatgaatagataatgtaaatgtagtgcatacatgtgatgcaattttattcagctgtaaataaaataaaattatgtaacttgacaagtaaatggatataatgtgaaaaaaaaaaacatactgactgatgtaatccagacacataaagacaaaagtcacacacaacactcatatggatactctctttcaacctttagagatatatgattaacttgaagtaccttcagaaatcagggaactagaaagaggccaatgggatgggactataaagaaaggttttaagataggggatagcagaatatgggtgccatgaaacagaaaaggggaattggagggaaaagatttaaatagagagggggttgggaggataaggcagaggaagggatgggaaaggataacacacacttaagatccttgaaaaactcacagaaacctacaatattagaagtgtccatgtgcactcatgtgtgcgcgcgcgtgcgtgcgtgcgtgcgtgcgtgcgtgcgtgcgtgcgtgcgtgcgtgcgtgtgtgtgtgtgttaaaaggacataccctgtagaggaaggataatacctcaccttgatgctataggttatgaaagaaatcctggtgccggatatgagatgttgctgttggagagtattaaccctctcacaaataaaacaggctattgccactgctcttggttaccaattagaattagacaataagatactattgttaaaggcaccatacatttgggtcacagactacagagaaatactggtactgacctggaagcttttgcctcctgggtagttttcatgctttcaaaagtgctatacaagctactgaggaacagttatcaatagttttatacagatgtaaactgtgtaagttacaaaaattacagaaagatcattcagcacaatagtggcataaatgctacaaagttaaccaaattctaactgaatttaaaggcccacaccacaaggtagaaatcaaccttagaaccatgtatgctgaacatacatagacaataagaaagaacatgccagtgtgtcataggttcttagtcttagcaatgctgaatgttcaaagactatgttacagataattcacacaagtcttcttagacgaaacttgagcagatttctgatatatatatatttaaatctttctatttaaatctttctccctcaatttccccttttctgtttcatggcacccgtattctgctatcccctatcttaaaagctttctttatagtcccatcatatatatatagtcccatcatatatatatatatatatatatatatatatatatatataatgaaactatcaaactagctatattcacccagggcaaacattggatgtaatatatatatcagttgcttattatctcatatcttacagttgggccataatacaccaatatagttcatgacttttcaaggtgacagaaatcgaagcatcagaataccaagaaattctgacactaaggcactaatgaaaccctgcctttctcaccaggtttcttcatgattcaaaccctgacttttgttttgacctagaatttattaagtggctagtagtgatttcttttaacaaaagcaagctatttctgagtcttcctaaaagttttggtaggatcattctcacctgatcagtaccacagaataatcaataatcatggcctcgtctttattacactacatcaagattcttataagacaaggttgttagaatctggggtcagggactaagttaggattcttatcaagagggagagccttataatttaagagttttcagacttgcacatgtttctcaacttcatatttcccaaatacctatagaaagaataattcatgatgagatagccatttgtaacaaggaaattatgatcctactggtcctagaaatgatgtgtctctatggaatcaaatcaattgtttcttttaattggcatgttgtctgtttcaaaggcatctctatccaagtgctatggaatttgtagtgttacagtcatgtgcacaccattgcagataacagtaactctggcatggaattgtgttgaaatcttcttatctgtaacctttgctgcagaatgccattttctgcaactgcttcttggaatataaaagagggaaacagctgtcaggtgagaagcacaggtgttaaatgccttggccctaccctttagctgaagtaatcttcatcatgaacaagacaatatagccataggatatcatgatggctaaagcatttgtaagcccaaaatcattgttaatattacaagcaggacctgggcaaagaaagtgtcagtacaggatagatttaacagctgtgataggtcacagaagaaatatctgatgactccacagaagtggagcttcagcaagacaaatatctgagatgagccctgctgtatagcttcccatcaccattccagcacagagggtggctacatgattgatgaatacagcagtgggttacaaatggcagcatacctgtcataggccacggctgtcatgatgcaagattcactcacgcccattgtggaaaagacaaagtattgaactatgcaaccgacaacgctgatattttgcttttcctggaagaaggtagagagcatctttgggactgttgaggtgatgtagcagaggactacaacagacaggttaatgaggaagaagtacaggggtgcgtggaggtgggaatctatccttactaaaacaagaagggacaggttccaggtcagtgctgtaatgtaaagtgtgaggaacataacaaagagcaatgctatgatttgggggaaatctgcgaatcccaggaggatgaaccgggtgatctcggtaatatttctgcccacaatcattaccttggtgctcctgctcctaaaataagaaaggaaatagaacaatgcattgcagtgcagactcaagtgacattacagcattattgtagagacattttaaacttgaatcacaacttcttaaaacaatgcctaagcaatgaggtgatgatacacactgagcatatacacatataaatgcatacgtatgtacacaaatgcgtatatacacatatgtgtgagttcacacacacacacacacacacacacacacacacagagagagagagagagagagagagagagatgcatcatactgtcatgattgtaaaactgacatttttgtctgggaaaaacagctcttctgcaatactgagaaatatcagcttaaatttttagttattatactacaaacagtacaacactctccttaaaacacataatgataagatgcaaaatgctgaatatagacaataagaaagaccctcccagtcttccattaaagggcatctaggttgcttccaggtcctggctattacaaataaagctgctaagaacatagttgaacagatgtccttgttgtatgaatgtgcttccttgggtaaatgcctaagagtggaattgctggatcttgaggtagactgattcccatttccctgagaaactgccatactgatttccaaagtgactgcacaagttgtcactcccaccagcagtcaaggagtgttccccttcctccacatcctctccagcataaactggcattggtgtttttgattttagccattctaacaggagtaagatagtatctcagagttgttttgaattacatttccctgatggctaaggatgttgaacactttcatatgtgtctttcagccattttaggttcctctattgagaattgtctatttagttctgtaccccactttttaattggattatttggtattttggagactagcttcttgagtgttattcttttgtttaagctgcagctgctgatataaagaaaggaacaacggataaacaacccatgtggagtttatttaccagaaaaggggggagaggcggatgggtagtcagccaacccaagaggagccaaaaggaagaaagcaagggatgtgtggcaggaccttttaaaggaaaggttgcatatgcgcactggggttttgcacctcacaggttgcaatgcatggcaggtgagtgagtgcaccgttgttaggggccggggtcagggtcatccagtgtattgttcttacattcagttctttgtatattttggaattcagtcctctatcagatgtgcaggtggtgaatatcatttcccagtctgtgggatgccattttgttttactgactatatcctttgcctgacagaagattctcagtttcaggaagtcccatttatcaattgttgatctcattgcctgtggtactggtgatatgttcaggaagcattctcctgtaccaattaattcatgggtagctcccaatttcgcttctaggaagattagtgtgactggatttatgttgaggcctttgatccatttagaattgtattttgtgcatggcaatagacatgggtgtatctgcagtcttctacatgtttgcatccagttatgccagcaccatttgttgaagatgctttctttattgtataaatttagcttctttgtcaaaagatagatgttcgtaggtgtgtggttaatatcagagttttcagctctattccattggtctacctgtctatttttgtgccaatatcaagttgttttcaaaactattactctgtaatagagcttgaagtcagggatgatgcctccagaagttcctttattgtacagggatgttttgactatcctgggtcttttgtttttccatatgaagttgagaactgttttttcaaggtctgtgaagaattgctgggcacacactctttcgtcaggtctggatgagggaactcataggaggaaagggtcccaaaatcaggcaaaggagtaggacaggctccactgctgctgttaagaatactgcaagaaccacaatcaatacaaccataacatatatgcagaggaactagatcagacccataaaggcttcctgattgtcacttcagtctctgtgaacctctacaaacctgctcagttcattctgtggtcagtgttcttgtcccccctaccttctcaatgctgggattacaggtgtaaatcacttctctggctctgggagaatattaactttctattgttttcatttccatgagcatgtttatcactgtactatggcaaatatttagtttccacaacagtgaagcaaggtattctgtaaggcaattctgcttaatgatggtaacggtcacctggagaaaacagctctcctgcaatactgggaaataggttatgtttttagctattattctacaaatattacatcactctcttaaaaacacaccatgataggacacaaaatgctgaacatacatagacaataagaaagaacatgccagtgtgtcataggttcttagtcttagcaacgttgaatgttcaaagactatgttacagttaattcacacaagtcttcttagaccacatttgagcagattcctgatataaatatatatatatattatatatatatatatatatatatatatatatataatctaactagctatattgacccagggcaaacttctggatgtaatatagaagagtagtctagatcagttgcttattatcagatatcttacagttgggccataatacatcaacatagttcatgacttttcaaggtgacagaaatcgaagcatcagaataccaagaaattctgacactaaggaactaatgaagccctgcctttctcaccaggtttcttcatgattcaaaccctgacttttgttttgacctagaatttattaagtgactagtagtgatttctttaacaaaagcaagctatttctgagtcttcctaaaagttttggtaggatcattctcacctgatcagtaccacagaataatcaataatcatggcctcgtctttattacactacatcaagattcttataagacaaggttgttagaatctggggtcagggactaagttaggattcttatcaagagggagagccttataatttaagagttttcagacttgcacatgtttctcaacttcatatttcccaaatacctatagaaagaataattcatgatgagatggccatttgtaacaaggaaattatgatcctactggtcctagaaatgatgtgtctctatggaatcaaatcaattgtttcttttaattggcatgttgtctgtttcaaaggcatctctatccaagtgctatggaatttgtagtgttacagtcatgtgcacaccattgcagataacagtaactctggcatggaattgtgttgaaatcttcttatctgtaacctttgctgcagaatgtcattttctgcaactgcttcttggaataaaaaagaaggaaacagctgtcaggtgagaagcacaggtgttaaatgccttggccctaccctttagctgaagtaatcttcatcatgaacaagacaatatagccataggatatcatgatggctaaagcatttgtaagcccaaaatcattgttaatattacaagcaggacctgggcaaagaaagtgtcagtacaggatagatttaacagctgtgataggtcacagaagaaatgtctgatgatattagatccacagatgtggagcttcagcaagacaaatatctgaggtaaagaacttatgagtcctgctgtatagcttcccatcaccattccagcacagagggtggctacatgattgatgaatacagcagtgggttacaaatggcagcatacctgtcataggccacggctgtcatgatgcaagattcactcacgcccattgtggaaaagacaaagtattgaactatgcaaccgacaacgctgatattttgcttttcctggaagaaggtagagagcatctttgggactgttgaggtgatgtagcagaggactacaacagacaggttaatgaggaagaagtacaggggtgcgtggaggtgggaatctatccttactaaaacaagaagggacaggttccaggtcagtgctgtaatgtaaagtgtgaggaacataacaaagagcaatgctatgatttgggggaaatctgcgaatcccaggaggatgaaccgggtgatctcggtaatatttctgcccacaatcattaccttggtgctcctgctcctaaaataagaaaggaaatagaacaatgcattgcagtgcagactcaagtgacattacagcattattgtagagacattttaaacttgaatcacaacttcttaaaacaatgcctaagcaatgaggtgatgatacacactgagcatatacacatataaatgcatacgtatgtacacaaatgcgtatatacacatatgtgtgagttcacacacacacacacacacacacacacacagagagagagagagagagagagagagagagagagagagagagagagagatgcatcatactgtcatgattgtaaaactgacatttttgtctgggaaaaacagctcttctgcaatactgagaaatatcagcttaaatttttagttattatactacaaacagtacaacactctccttaaaacacataatgataagatgcaaaatgctgaatatagacaataagaaagaccctcccagtcttccattaaagggcatctaggttgcttccaggtcctggctattacaaataaagctgctaagaacatagttgaacagatgtccttgttgtatgaatgtgcttccttgggtaaatgcctaagagtggaattgctggatcttgaggtagactgattcccatttccctgagaaactgccatactgatttccaaagtgactgcacaagttttcactcccaccagcagtcaaggagtgttccccttcctccacatcctctccagcataaactggcattggtgtttttgattttagacattctgacaggagtaagatggtatctcagagttgttttgaattgcatttcccggatggctaaggatgttgaacacttttttatgtgtctttaagccattttagattcctctattgagaatttctatttagttctgtaccccactgtttacttggattatttggtgttttggagactagcttcttgagttttgtatattttggaaatcagtcctctgttaggtgtggttggtgaatataatttcccaatctgtgggatgccgttttttcttactgactgtatcctttgcctgacagaagattctaattttcaggaggtcccatttatcaattgttggtctcaatgtctgtggtactggtgttatgttcaggaagcattctcctggaccagttaattcatgggtagctcccactttctcttctaataggtttagtgtggctgcatttatgttgaggtctttgatccatttagacttacattttgtgcatggcaatagacatgggtgtatctgcagtcttctacatgtttgcatccagttatgccagcaccatttgttgaagatgctttatttattccatagtatacatttagcttctttgtcaaaagttagatgattgtaggtatgtggttaatatcagagttttcagctctattccattggtctacctgtctatttttgtgccaataccaagttgttttcaaaactattgctctgtaatagagcttgaagtcagggatgatgcctccagaagttcctttattgtacagggatgttttgactatcctgggtcttttgtttttccatatgaagttgagaactgttttttcaaggtctgtgaagaattgctgggcacacactctttcgtcaggtctggatgagggaactcataggaggaaagggtcccaaaatcaggcaaaggagtaggacaggctccactgctgctgttaagaatactgcaagaaccacaatcaatacaaccataacatatatgcagaggaactagatcagacccataaaggcttcctgattgtcacttcagtctctgtgaacctctacaaacctgctcagttcattctgtggtcagtgttcttgtcccccctaccttctcaatgctgggattacaggtgtaaatcacttctctggctctgggagaatattaactttctattgttttcatttccatgagcatgtttatcactatactatggcaaatatttagtttccacaacagtgaagcaaggtattctgtaaggcaattctgcttaatgatggtaacggtcacctggagaaaacagctctcctgcaatactgggaaataggttatgtttttagctattattctacaaatataacatcactctcttaaaaacacaccatgataggacacaaaatgctgaacatacatagacaataagaaagaacatgccagtgtgtcatgggttcttagtcttagcaacgttgaatgttcaatgactatgttacagttaattcacacaagtcttcttagaccacatttgagcagaaaccttatatatatatatatatatatatatatatatatatatatatatatctaactagctatattgacccagggcaaacttctggatgtaatatagaagagtagtctagatcagttgcttattatcagatatcttacagttgggccataatacaccaacatagttcatgacttttcaaggtgacagaaatcgaagcatcagaataccaagatattctaacactaaggaactaatgaagccctgcctttctcaccaggtttcttcatgattcaaactctgacttttgttttgacctagaatttattaagtgactagtagtgatttcctttaacaaaagcaagctatttctgagtcttcctaaaagctttggtaggatcattctcatgtgatcagtatcacaatataatcaataatcatggcctggtctttattacactatatcaagatacttataagacaaggttgttagaatctggggttggggactaagttaggattcttatcaagagggagagccttataatttaagagttttcagacttgcacatgtttctcaacttcatatttcccaaatacctatagaaagaataattcatgatgagatggccatttgtaacaaggaaattatgatcctactggtcctagaaatgatgtgtctctatggaatcaaatcaattgtttcttttaattggcatgttgtctgtttcaaaggcatctctatccaagtgctatggaatttgtagtgttacagtcatgtgcacaccattgcagataacagtaactctggcatggaattgtgttgaaatcttcttatctgtaacctttgctgcagaatgtcattttctgcaactgcttcttggaataaaaaagaaggaaacagctgtcaggtgagaagcacaggtgttaaatgccttggccctaccctttagctgaagtaatcttcatcatgaacaagacaatatagccataggatatcatgatggctaaagcatttgtaagcccaaaatcattgttaatattacaagcaggacctgggcaaagaaagtgtcagtacaggatagatttaacagctgtgataggtcacagaagaaatatctgatgactccacagaagtggagcttcagcaagacaaatatctgagatgagccctgctgtatagcttcccatcaccattccagcacagagggtggctacatgattgatgaatacagcagtgggttacaaatggcagcatacctgtcataggccacggctgtcatgatgcaagattcactcacgcccattgtggaaaagacaaagtattgaactatgcaaccgacaacgctgatattttgcttttcctggaagaaggtagagagcatctttgggactgttgaggtgatgtagcagaggactacaacagacaggttaatgaggaagaagtacaggggtgcgtggaggtgggaatctatccttactaaaacaagaagggacaggttccaggtcagtgctgtaatgtaaagtgtgaggaacataacaaagagcaatgctatgatttgggggaaatctgcgaatcccaggaggatgaaccgggtgatctcagtaatatttctgcccacaatcattaccttggtgctcctgctcctaaaataagaaaggaaatagaacaatgcattgcagtgcagactcaagtgacattacagcattattgtagagatattttaaacttgaatcacaacttcttaaaacaatgcctaagcaatgaggtgatgatacacactgagcatatacacatataaatgcataagtatgttcacaaatgcgtatatacacatatgtgtgagttcacacacacacagagagagagagagacagacagacaaacagaccgacagacagacagacagacagagagagagagagagagagagagagagagagagagagagagagagatatgcatcatactgtcatgattgtaacactgacatttttgtctgcgaaaaacagctcttctgcaatactgagaaatatcagcttaaagttttagttattatactacaaacagtacaacactctctttaaaacacataatgataagatgcaaaatgctgaatatagacaataagaaagaccctcccagtcttccattaaagggcatctaggttgcttccaggtcctggctattacaaataaagctgctaagaacatagttgaacagatgtccttgttgtatgaatgtgcttccttgggtaaatgcctaagagtggaattgctggatcttgaggtagactgattcccatttccctgagaaactgccatactgatttccaaagtgactgcacaagttgtcactcccaccagcagtcaaggagtgttccccttcctccacatcctctccagcataaactggcattggtgtttttgattttagacattctgacaggagtaagatggtatctcagagctgtttggatttgcatttccctgatgactaagaatgctgagcagtttcataagtgtctttcagccattttgaattcctctacagataattctcttttaagttctttatcccactttttatttggattatttggtgtttcggtgtggtacatttacacaatggagtactactcagcaggaaaaaaaaaacaatgaaatcttgaaattcataggcaaatggctggaactagaaaaaatcatcctgagtaagataatccagtcacagaaagacaaacatggtaattcctcactcatatctcactcatatatggatattagacataaagcaaaagattaccagcctacaatccacgccaccatagaagctaagaaactaggaggactctaagagagacatgcatagtccccttgagagggggaaatggataagagctcctgaataaattgggagcttgggaagggagagtagggaggtaggagaaagaagaggggagaagttaacatgagggatcaggaagattgagtcagggggataaatagtggagagccagagaagagataccttaatagagggagccattatagccttaaagagaaatctggtactagggaaatgtacagagatactcaaggatgaccccaaataagaatctaactaatagttgagaggctaccttaaatggccttcccctatgatgagattgatgactaccttaaatgccatcctagagccttcattcagtagctgatggaagcagaagcagaagcagaagcagaagcaaaaacccacagctaagcactgatccgaactccaggactccagttgtagagggaggactgataaacaaaggggtcaagaccattctggggaaacccacagaaacagctcacctgagcaagtgggaattcatgtaccccagccagataattggggaaccagcataggaccaaaccaggtcccctgagcttgggtggcagttagactttgatgattttcccttggaaggcctcactctccctggggagtggatgtggagtgggacagggtgggggggtccggagagtgggttcagtggagggcatgggaggatgggagggagagggaatgggggttgatatgtaaaataagattgtttctaatttaaatttttaaaagttaataaaaataagaacattccaatgtgtcatgtgttgttaatctcagcacttttgagtgtccagtgactatattacaatgaattcacaggagtcttcttaaacaaaatttgagcaggcacctgaaatatcagtaaatattttatgcagtcatcaggttgactatatttacccagagcaaacttctgaatgtaataaagaagagtaagagtaagagtaagagagatcagagtgccatcacctcatatattgctgttggcccgtataatactgctataagttacaacttttcaaggagccagaaatgaaatcctcagaataccgaggaattagcaataaagaaaccctgtctttctcaccattttttttcatgactcaaactccaacttttgtgtttgacctaaattttattaagtggctagtagtgatttcctttaactaaatcaagctgtttctgattagtcttcctaaggcacaataaatctagtatgtggctttatttcttttaaacaagaagtgttggtataatcattttaacctgatctgtatcacagaaaaaccaatggtcatagtctggtccttattacaatgcatcaaaatatttatgagacaaggtttacagactctggcatcacatttaggaatcttctttggagggatcgtcttgtaatttaacagttttcagccttgcgcaagtttctcaacttcttatatcacaaatacctatagacagatagaataactagtcatgagacagccatttagtaacaaggaaattatgatcctagtggtactaaaaatgatgtgttttcatggcatctgattaatggttgtcttatattggcatgctgtctgtttcaaggatgctttttatccaaagtgccatggaccttgtagtgttccagtaatatgcatatggttgcagataacagtgactctgatatggaattgggttgaaatcttatctgtaaccttggctgcagaatgtctttttctgcatcctcttcatagaatctttgatttccttgtttctcagactatatatcaaaggattcaacatgggaatcaccacagtgtagaagacagatgtaaatctgtcaaagctggaggagccaccagagctggaacgcaaatagacaaagataccagaaatgtagaagaaggaaacagctgtcaggtgagaagcacaggtgttgaatgctttagacctgcccttagctgaagtgatcttcatgatggacaagacgataaagccataggacgtcatgatgactaaggcatttgtaagcccaaacaacattgttagtaaagcaagcaggacctgggcaaagaaagtgtcagtacaggatagatttaacagctgtgatatgtcacagaagaaatgtctgatgacattaggtccacagaagtggagcttcagcaatgcacacatctgagataaagaacctaggagccctgctgtacagcttcccatcaccatgcgagcacagagggtgggtgacatgattgatgaatacagcagtggcttacaaatggcagcatacctgtcataggccatggctgtcatgaggcaacattcagtcagtgccatagtagaaaagatgaagtattgaattatgcatcccccaaagctgatagtttgcttttcctggaagaagtttgagagcatcttgggtactgtagaggtgatgtagcagaggtctacaaaggacaggttactgaggaagaagtacatgggtgtgtggaggtgggagtccatccttattaaaacaagaagggacaggttccaggtcagtgctgtaatgtaaagtgtgaggaacataacaaagagcaatgctatgatttgggggaaatctgcgaatcccaggaggacgaactgggtgatctgggtaatatttcttcccacaatcattacctcagttcctaaaataaaaaaggaaataagacaatgcattgcagtgcagactcaagtgacattacagcatttatcttaatgagagtcattttaaacttgaatcccaacttcttaaaacaatgcctaagaaatgatgtgatcacacatacatgaacatgcacacatgaataagtataaatgaaaacctgtgtatacacacacatgtaagtacacatacacataaacacacacagagagagactggtatcatgctgtcattatttgtaattctgactcattttgtggagcaataacatgtgttcctagagaagttataaaatcactcttcctatgaaagtgtcatatgaagatttcatatcctggcattagtttaaagttctattacagttaagaattaatagctgtatttataataatttctacaaatttgtctaacacagtatttccaaactggcctgaatcatagtgtcatgatttgtaactctggtggattttggtaatacaaaagcatatgttccaagtaaagtttaaattttgtctttatggatgtgttttatgagggacttgagaaggaggtgggtagagctgtctcatttgtgagtatgtttcctctagaaaacaggacagtcaggaggattttattgattcatcaactcagttctaattccattgttctgtattaaactatcccagtggcttaaacaaaatgaccttagcacttactgtaaagagagaacagtggaagaacttggctagaaagccaaacaaaacagtaaggatgctgtgatttctattttatttccccaatttttatatctgctatattttaatggcaattcatgatttatacccacaataacaaaggacaggagaacctgaaattcacctactggctgcatattcctttatcatgttaacacagttctgactcagtagtctcatgtatgaatggagatgatgaaactggccattctctagcactgttcatgatactgaatgtcataaggggtctacacacagaggtccgttgatgttagtaattgttcttctgccatcacctccttctgtaaaatgcaattaatggcagaacaaagatgatatgtaaaggaccttttgataaagttagttcctgcaaaaattatctgaggcaggtttcaaaaacgttattgagaagtagttattagaatatctactcctgtctcatgttatttttggaactcccacttagtcagattgcagattcttattgctgcatctgttttcctccacaaagtgctatctagaagacagtgctatccgtgaaggactggaagagattttctccttagtgataagtgttgtgttcactgacatttgcatccaaccaaaagcataggttgaatgtattatgaactggttctactcaactttgcatttgaaactcagcatcttacttttgcttactttccattatgatttcatggcatggccatatcactgtttattcttaaaataaaaaaaaatgtttctcaccaatgacagtttatgctggagaggatgtggagaaaggggaacacttctccactgctggtgggagtgccaactgatacagccactttggaaatcagtatggtgattcctcaagaaaatgggaatcggtctaccacaagatctagcaattccactcctaggcatatacccaaaagaagcacactaatacaacaaggacagctgttcaacaatgttcatagtagctatgaatttgtagctattactatttgtaatagccagaaactggaagcagcccagatgcccctctaccaaagaatggatagagaaaatgtggtacatttacacaatggagtacagtgggggaaaaaatggaatcttgaaatttgcaggaaaatggatggaactagaagaaaccattctaagcaaggtaacccaatcacaaaaagacaaacatgatatgtactcactcatatgtggattttagacatagagtaagggattaccagcctacaatccacactgccagagaaaccagtaaacaaggaggaccctgaaaaagacaaactttgtcccctggagaaagggaaaggttcatgatcccctgagcaaattgagagcacaggaagaggggtgagggagaatgagaagggaaaaagaggaaggatgcagaggtcatgggagagcagaaaggttgagtcaggtgtaaattagaagaaaggatatgtgataggtagggttttagttggggggggtggtaggggaggacgggagagagaagggaactgggattgtcatgtaaatcaatcttgtttctaattcaaataaaaaatgattttaaaaattgtttcttagttcatccaagttgagttacatttaataaaaacattttgaaatgataaacactcatgggtaggtaacattctgaaatatttatttgattgctcagttcaataagcatgattgaaaagtttgtcactgactctgaagaccccttatggaaggcctcacactccctggggagcagaaagggtatgggataggtagggtgttagtgggggagggcgagaagtgggtgtgggtggagagggaactgggattgacatgtaaaacaatcttgtttctaatttatatttaaaagtcgagaaaaaaagaaatgatagttactatctcgttgcattctgttgatataggaaggcatatttaggtatattttatgtaacacactattccgagtattgactgaaaaagttatgggctattattttactcttaatactttttctacactaatttatttaaatgctgtagcagaggaaaaacagaacatactcagtcttttcattagtgttctgtatgtgttcagcatctcccaagacaatttaaagtagaaaagctattaaagattcacctgaatagacacagcttatcagttctgatctaacaaaaacgtggccagtttaatgaaatgtgctgggaatagtaagttaaatacatgttgcctagtgagaaaaatgtgaataatagatggtgaaatggacagttagaccaagactacctgtgtctcgagtggatgactctgataatcgcactgctaaagctagcgtctctggggttcaccaaaggtgacactggagagctatttaaagattgtgaactgcctgggagaactgtgcttaactattcggtcataagacttggtttgtctcatacaacaaagtcatgagccaaagctatgcatctaaatagaatatgattcctattatttcaaagatatcacccagatcaacaaaaatgcatcgaaaagagttccagggaaagtggaaagttgagatatgtggacaagcatgctttgctcttaggaaatctgaaactaagtcaatgcctattttttttttatccacgtctcaatttctggcttttaaaattagctaggcaggctggagagatgcctcagccattaaaggctgggctcacaaccaaaaataaaattagctaggctttataggtaatctcttttggctatagcctctctcatttgctccattgttataagtaggaaatggaaagtagcagaatttaacttacatacttaagaactcaacaaccacctatccaccctagacatatacctgatattttaatcataggatctattcttttctgtgaacagcacataatttgggtaagtacaaaaagaaactaatgaaaaatatacaggaggagagtggctaggagaataggaaagtctaatcctatgaatcttattagatggtggagtcctcctggaaaaatgatggatctcaagatagcagattctaactgcaattcttaccttctgatctttaccaagactacaggaagacagaattcttgccgaatgttgacactgccaatattccaaataattttccaggagggacactactatattcttagtgaatgtttttggccattaacctgaccgtctactaataacaagtgagagagcaatactggggaatcctcttaaatgtgctgttgtgagcaagagtggaggggaaaagccaattatagaacacactacagactcttgctctctggcatcatggttgtcatggagatttttctaataattacaggcccagtttgccatgtgcatcaaatctcaacttcccctgtgatctattatgacaccacattttaactttactgaccttggaggcatttagtctccaaagaccataaggatctcctagtccccaaatcttaatttataggagacaaatttgagttcagagatgttaagggattttcccaagataacacaacaagctgataatataccacaacattgatatatatatatatatatatatatatatatatatatataatatatgtatatatatattatatatgtgtgtatatcaatatatatatatatatatatcactttatttagatatgcacatattttctcaaatctctgttgtgagtcaatcaatgcagcagctctaacagacctgtagcatgtcccacacctaagtgaataaataagtcaaagcaatatgttatctatccattcataacaaaaaacagaaattcaggacagaaaatgtcatatcacaatcacacccttgagtgttggtaccataaagtaaaatttgtgttgaggactggcaagtgagggtgcttgtatcaagcttatgacctgagtttctgggggcacatggtgggaagagagaactgactcccattgttatcactctgtcctacacacacacacacacacacacacacacacacacacacacacacaaataatataaatttaaaaacatttgccattgaattctggctttccctcttcctggtttgtgttcttgtatacatttctccaaaccacagtatttccctatattaaatggcttagtaatacctaagccataaagaaaatctgaagagaattaatttggataaagattaacgaaaatgtaaatttcatggtatacatcagatcttgtatttattaatcacatgtattttgaaatgtggtttagaaatctaacattagccataagtccaatctttcaaaataaacacttcatgaaaccctttcatttttttaatttttattttattagttctagttagggaacaagcttatttcaagtcccttctccctctccctaccctcacccccaacccacccgcagactaccccccaccccatccacccaccactccccaggcagggtagggccctcaactggggctctgcaaagtccaccaagtcttcctatgctggtcctgggcccttccccatgtgtccagggccagagtgtaacccttcacatgggatgggctctcaaagtcccttcttgcaccagggaaaaatactaatccaccaccagaggctccctggagtgcagaggcctccttattgacatccatgttcaggggtctggatcagtcttgtactggcctcccggacagcatctggggtcgatgtgctctcccttgttcaggtcaactgttcctgtgggtttctccaacctggtacagaccccttcgttcttcattcctccctctcttcaactaaattccctatttcagctcagtgtatatgtgtggatgtctgtctctgcttccatcagccactggatgagggctctagcatggcataaagagaagtcatcaatctcattttagggggagggcttttgggttatcctctccaccattgcctggattgtcagatcgtgtcatccttgtggtctctggagatctcactggttcccgatctcttctcgggcctatagtggctccctctgatatggtatctctcatcctgctctctttcctctattcttcccccaactcaatgtttctgcccctccatttcctctcctctactcctcttctcttgctcttattgtagcagctccttccccccccaccctcatgcccccaattagttcgggagttcatgccacttccattcctggggaccatttatcccttagagtccttcatgtttcctagtttctttggtgaagagcattatagactggtaatcctttgctctatgtctaaaattcatatatgagtgagtacataccatgtttgtctttttgtgactgggttacctcactcaggatggtttcctctagttccatccatttgcctgcgaatttcaagattccattgcttttttctgctgagtagtactccattgtatagatgtgccacattttctaaatccatgcttcagtagagggtcatctaggttgcttccaggtcctggctattacaaacaatgctgttatgaacatggttgaacatatgtccttgttgtatgcacatgccctatttgggtatatacccaagagaggaatggctggatcttgaggtagactgattcccatttttctgagcaaccaccatactgatttccagagtggtcttacaagttcgcactcctaccagcaatggaggagtgttcctttttctccacatcctctccagcatagattgtcattgctattttttattttagccattctgacaggcatgagatggtatctcagagttgttttgagttgcatttctctgatggccaatgattttgagcactttcttaagtgtctttcagccatttcagattcctctgttgagaattccctatttagttctgcaccccactttttaatttcattgtttggtgttttggtggctagcttcttgagctccttatatattttggaaatcagtcctctgtcagatgtgggatcggtgaagatcttttcccattctgtgggtggtcgttttatcctactgactgtttcctttgccttgcagaagcttctcagtttcaggaggtcccatttattgcagtgtctatgctactggtgtaatgttcaggaagtggtctcctgtgccaatttgttcaagggtaatttccactttctcttctagaagattcagtgtggttggatttatgctgagatctttgatccatttgcacttaagttttgtgcatggtgacaggtatggatctatctgcaattttctgcatgtccgaatccaattgtaccagcaccatttgttgaagatgctatcttttttccattgtatagatttagcacctttgtcaaaaataaggtatccataggtgcgtgggtcaatatcagggttttcaattcgattctattggtctatcagtctatttttgtgccaataccaagctgttttcagaactatggctctatagtagagcttgaagtcgggatggtgatgcctccagaagatcctttattgtaaagagttgttttggctatcctgggctttttatttttccatataaagttgagtattgttctttcaatgtctgtgaaaaactgtgttgggattttgatggggattgcattgaatctgtagattgcttttggcaggattgccatttttactatgttaattctacctatccaagagcatgggagatctttccattttctggtatcttctttaatttctttctttaaagtctcaaagttcttattgtacaggtctttcacttttttggttagtgttaccccaagatattttatgttgcttgtggatattgtgaaaggtgatgtttccctgatttctttctcattggatttatcatctgtatatagtagggctactgatttttttgagttaattttgtatcctgctaccttgctgaaggtgtttatcagctgtaggagttccctggtagagtttttcgggtcactaatgtagactatcatgtcatctgcaaatagtgaaagtttgacttcatcctttccaatttgtatccctttgatccccttttcttgtcttattgctatagccagaacttcaagaacaatattgaagagatatggagagagtggacagccttgtcttgttcctgattttagaggaaacgctttgagtttctctccatttactttgatgttggctattggtttggtgtatattgcgtttatcatgtttagatatgttcctgttattcctgttctctccaagatctttatcatgaagggatgttggattttgtcaaaggctttttcagcatctagtgagaggatcatgtggtttttctttttcagtttgtttatatggtggtttacattgatggattttcgtatgttgaaccatccttgcatccctgggatgaagcctacttgataatggtgggtgatttttctgatgtgttcttggattcggttggccaatattttattgagtatttagcatcgatgttcatgagggatatcggtctgtagttctctttcttagtcatatctttgtgtggcttgggtatcaaagtgattgtagcctcgtagaaagagtgtggcaatatcccatctgcttctattgtgaggaacagtttgaggagtactggaattagctcttgtttgaatttttggtagaattctgcagtgaaaccatctggccctgcgcttttttggttgggaggcttttgattactgcttctatctcattaggggttatagttcgatttaaactgtttatctgatcttgatttaattttggtaagtgatatttatccagaaagctgtccatttcctttagattttccaattttgtggaatacaggttttcaaagtatgacctaaagattctctggatttcctcagtgtccgttgttatatcccccttttcatttctgattttgttaattagcatgctctctctctgccttttggttagtttggctagaggtttgtctatcttattgatcttctcaaagaaccaactctttgtttcattgattctttgtactgttttcctagtttctactttgttgatttcagctctcaggttgattatttcctggcgtctactcctccttggtgtgtttgcttctttttgctctaaagctttcagttgttctgtcaattctctaatgtgactttcctccagtttcttcatgtgggcacttagtgctatgaacttccctcttagcactgctttcagggtgtcccataagttcgggtatgttgtgtctacattctcattaaattctaggaagtctttaatttctttttttatttcttcctcaacccaggaatggtgcaattgggagttattcattttccacgagaatgtaggttttctgcaatttgtattgctgttgaattctagctttaatgcatggtggtctgataagatacagggggttatttcaatacttttgtaactgtggaggtttgctttgctgccaactatgtggtcaatttttgagaaggttccatgtggcgctgagaagaaggtatattcttttgtgtttggatggaatgttctatagatatctgttaaacccagttgtgtcataacttctttcagatcctttgtttctttgttaagtttctgtctagtggttctgtccaatggtgtaaagggggtgttgaagtctcctactataagtgtgtgtggttttatgtgtggtttgagctttagtaatgtttcttttacaaatgtgggtgctttcgtattaggggcatagatgttcgggattggaaaccctttcattaaggaggatgtaatagtcataggtaatcaaaatactgtcttcagcaattgcacacaggaaatcatgggcagctatgaccacatgcacaaaacctccactagatcaagcctgacaaatcccatcatgcacagggagataggggcgcccattcctagatgagtagctattgacagctgattctcccaaagggagagttatttgatttcttgaggatgtcgcccctgggagggggcaggggctaccatgctccagtaggtggctctacactcatgcacatactggcagcatgaagtggactcagtggatttcaaaaggaataaataaaatgtggcaggaatagtggtggaagggataagggaaaaattagaggggaaggaatgaagagtgaacctgaccaaattgtattacatacattatgaaattatcaaacaataataaaataaagcatagacggttacgataaatctttccaacaaatccgcccaagccctaccaccacgagggcagtctccgccagccacccaagttctgcccgctgcgtggatggacaaaataatacagagacatattaggtacaaagctgcttggccaatgactaggatttctcatctgttagctcagtcttaattatcataagtctatatattttataagacttatagaggatgcctttcgctggcaccctctcttgctgatggctcgcacggcgctattggaggaggaagtggaaaaagggacacttcctgtttctccttgctaaatatgagtctccttgcttctggcctggatcaccacttctctactacatttcccagaatcctctttgactcctagtcctgtctaacttgctatttcattggccaaacagaactttattaaacaatcaataaggtaaacatacacagaagtactttccccatcaatagacttaagctcctgaggacaataggcctcagacacccgagaacctcatgcatctgcatatctcttacaagtttctgaggatttgcaccaataacctgctaactctacattctgcttgtacctacccttagttgacctgggaccacttttgatataccaattgcacagcaacactgcttgttgttttgtggggtttttaacaaaataatatacaataaaatgaaatgaaaactatcacatcaaagttggacaaggcaaaaccaacagaaggaaagaagctcaagataaggcaaaattggagactcgctcatgcacactcccaagagtctcataaaacactaaaccggaagctatagtacatacacacagaaccatgcaggccctgtacttgctgcttcagtctctgcgagttcatatgaactttgctcagttggtttgcaggccccctgtggctcttaacattcttttcatctccactttcctggggttctctgatctctgaggggagggatttgaagacgacttcccaattagtgctgagcattccaagttctctccctctctctgggttaaggtctggctatgggttgttggattcccctcccatctggtatggtaggaaacttctctgatgatgcctaaataagacactcatctgtaagtatagcataatatcatttaatcattttatcactatttttaaggcaagtagtatttggttttaccctagacctctgagctatctagtctctggttcttggtcgcccaagtagtattaagttatgggttccatcttgtggagtgtgccttaagtcgaataagatgttgttggtcacttccacaagcactgagccaccattgccctggcatattttgtaagcaggacagccttgtagatcaaaggggtttggctaggtttatgtttctcttttggtagcctacagagtaccttcccataccaaagacactagaatgtagggatagaggttctatgtaggtaccagcttgatatcccatgttcaatgagttatgtagttattgtcttcatcaatggggccttgatgtaaggacatctaggttattttaattttctggctattatgaatagacaagcatccttgctgtaggacaaagcatcctttggttatatgcccaataacactatagctggaccttgaagtagatcaatttttaattttctgaggaactgccatattgatttccacagtggctgtacaagtttgcactttcaccagcaatggatgagtgttcctcttattccatatccttgccagcatgaactgtcacttgtgttattgatcttagccattctgacaggtataaggtaagtagaatctctaagtagttttgatttgtatttccacaatggctaaggatgttgaacatttctttttccagagggtgtttggggcatttcaagcttcaagctgaagatcagaaaagcaaagtagctggtcactatctcttactctacctcagactgaaagatgatcctggctccaccaaacctcagactgtaacctctcctcagagtggctggagaatcctgagacttcaatgtcttcctatcctcaatgtggctggaaaattaatgcctgatactgagaccttgctccggtcttatatacctcagtaatgctgggattaaatgtgtgtgatacaggtgctgtgatcatctttgtgtgagcagtttctctttagaattggatcagtttcctgtagctcagtgtggcactgaactaacagagatccatctacctctgagtccagggattaaaggtgtgtgcctgtcttctatggcttgtagctgactttgatatctgaatcctcaggcaaaatttaataaatcataaataatatatcaccacaattctcctttttgtctaatacaaaaagaaggctacaactaataaaaaaatctatatacaataagtatgtaaaatatataagacaataagttcatcaacaatatctagtcgatttgcatttgacaaattcagagaaaatactttattatctagtctatcttggtgagtccaaagtcttgtacctaacttatttcctattttaatttgtattgtcaaattatcttttaatgtctctcaaccttttacacttcacatatctttactgaattttcttttcttagtctggtaaacaatgaaaactataactatactagctagtcttcaactccttcaaagacccaagaaagacatattaactgagtaagcaggaagtatgagaaagtgacttctgaaaaatatgaggaaagacagaaacagtgaatatttctttaagtgttgctcagccatttgaaattcctctgttggaattctgcttagtctgtactccattttaatagaggactaattttggatattagtcctctaatagaggactttgtgcacacagatactcactggagaagccaggaaaaactatctcttcaatggaatgaagtgcttctttttggaatgctgggaatggatatagttttcaacttggtgatcctttgctgtctgataagccaggctcttcccatagctcccagaacatatgctttacttatcccagacccttttcctctcaaatattgagcattgctcttaggaaaaaaaaacacccattcatatatgtgatgtctcttgtactttacaacagcctaagggacttctatgctacattagggccaggccaatcctgatacccacaggtgttgtttgcctcattcagtctccctagaccctaaatcttgggagctatctgagtcaacagtacccatctttgggaaagaagtcagatatactttgtaaagaatctcaatgtaagcatgtcttaaatttgttgtgcacttgagactacgttaacatttctcaaagagaactttattccaaaattgttggctacttaaatatggctaaagtaaattatctggaatcagactctagaagtcttggtccagcaccagtacaaaaatcaggctgaacaaaatttcatgtttctctctttatgtatcacttccttccctgctataaagcctgcagggaccctccacactctatcagatatggagttggcaaaaaaaaaactttcccattctttaggcagctgtgttgttcaaatgatggtgtcttttccttacagaagcttttcagtttcatgaagtcacatttattaattgttttttaagaacaaaagaaagaaggcatggatctggatgaatgggaaggtgggaggatcatggaggacttaggggaaggaaaccagtgatcagaatatactgtatgaaaaaatatattaaaaaaactgaacttgaaatttcattacactgattcaaaacctgacaagttgggagaacagcagagatccagaggctcactccacaaaggttggacagacacccatatgagaaaatactaccaaagatacaagttcatttgaaaagtcacaaacaacataaataaccaagacaatatgtctcctccaaacattaacactgctatactaatgttgcctgaaaatgcaactgagatgacacacaaaaacaattataaacatgttcaaggaactcaaagaggatatgaataaataccagaatgaagaccacaaagatacaatcacctgcgtataaaaaggaaaacaattcaaaatgtagaagtagaatttagtaaaaaggtagaatttctgaagaagtaactaacataagatgaatcatatcaccttagtgtaaaaggatagacacaggtatttcaagttccttaggaaactaaagaacaagcagtcatagcattctgatacctgacaaaatagaccttgaatcaaaactatccaaagagataaagatgacaactttataccaatcaagggaggaatccatcaagtggacattacactatgcaccaatctcagatgcactcaaagcaacatattatccttaatacattaatagtagatgacttcgttcataccccattttcaccaatggataggtcatccggaaccaaaaagtgaacggagaaattatagagctaaatgatgtcataaactaacaaacctaaccagacatctatagaaaactacccaaacactaaagaatatacatacttcttccaagaagcccacagaatttcttctaatataatatagggcacaaagcaaaccttaacaaatacaggaaaattgaaataacatcattaattctatcagtcagataaagctggatatcagccacattagaaactacaaaaaaatatatgaactcatggaaactaacaaacacaaacacttataattgagtaaagggaaaaaatcaaataaattaagtgaaaatttaaaaaaatatcaaaatctgtggagacatgatgaaggaagtactacaagaaaagtttacagcacttaatgcctacatcaaaaacaaaaagaaaactctagagatcttataataataacttgatgtacctgaaagctttgggaaacaaggacaaacaatatcaaaagcaaaacatggtaacagaaaatcaaaataaaggctgaaattaatgaaagagaaatagaaaaaattcattgtaaagaattgcttttgctacaggtggtggtggcacattcctgaaatcccagcacttgggaggcagagacaggcagatctctgagttagaggccaacctagtctacagagtgagtttcaggacagtcagcactacacagagaaaccctgtctcacaaaacaaaacaagaattggttttgcatttacagttgaagtttagttttgtttcaagtaacaatgactgtagaatagctttttaaaagattcttctttaagaccctaaaagagacaaactttgtcccctagagaaggggaaagggtcaccaccccctgagcaaattgataacatgggaagaggggggagggagctacaagagtgagaagggaagaagaggaaggatgcagaggtcatgaggaagcagaaaggttgagtcaggtgtagattagaagaaaggacatatgataggtaggattttagttgggggaggtggtaaaggaggaagggaggaagaaaggaactgggattgttatgcaattcaatcttgtttgtaattcaaatatataaaaaaataaaaaattaaaaaaattataattcctgaaacctataaatgtgcaaagagaataaaataaaagtttaaggcaagcaaaaaaatttcttctttaaaagcaatttaaaataaatttagggctatacacatcatctaaacatcgataatttttttcatttaataaccaaattttctcccaaaaaaattgtcagattttaaaattagtgtccagttgcaccctttcagttaccttcagtttgtggcacttacccaatttggaaagtcttacatataagatcactgtttaacatcttagtcctctgctagatgagcccacaagagctgtgttatttgaaaagtttctgataagcctctctgccaaggtagccatccaaatcagacccaatcaaaccaaattagaaaagtttgggctaggcggtggtggcacatgcctttaatcccaatacttaggaggcagaggcaggcggatctgtgtgagtttgaggccagcctggtctacagagcgagtgccaggacaggctccacagagaaaccctgtctcaaaaaaaaaaaaaaaaaaaaaaaaaaaaaaaaaaaaaaaaaaaaaaaaaacaagaagaggaggagaggaggaggaggaggaggaggaggaggaggaggaagaagaagaagaagaagaagaagaagaagaagaagaagaagaagaagaagaagaagaagaagaagaagaagaagagcacactcctggataattttcagccccagaaaggaaacaggaaagagataccagaaaatcatttatctgttttctgggggacagtttaaataccctgtgcaagtggtcttgagcgtctctggggtaagcatcatcacttggcaggctttctgaaatgcagcagggtttggagagagataggggaggaaagatgaggtggaacttccaccagagcatcccagactctttgggtatatgcatgccaggggctggggtgaagcctccatcagaacattgttcatcactaaataacaagccctacaaagaatctgtccaccataaggcagcagtactggctgaaaggaagcacccaagtccttaattctagttcctcccttaggtcaccttgttgagcctatctcgaccagcaagaaggacacgaccacgactcttcttcaagcagtttattcaggaactttgtacattagcttctacatcaacttccttagctttcctccatccgcttcttctctctgcttctatatctcccagcccctggcaatcccagatagcaagctcattacccaatgagctcacgccacctggcaatcccagatagcaagctcattacccaatgagctcacgccacctggcaatcccagatagcaagctcattacccaatgagctcacgccacctggcaatcccagatagcaagctcattacccaatgagctcacgccacctggcaatcccagatagcaagctcattacccaatgagctcacgccacctggcaatcccagatagcaagctcattacccaatgagctcacgccacctggcgatcccggataagtcacagctggaggaggcacaccagatccactaagcgcttccaaataaggcttgtttacagctaagctcggtctccctggcatccagccaggtgccatcttggggctgtggctccccacagttccctcttttttatttaaaaataacacaacaggcaagggtagaggtctgatccctgaaatcaaggaactttgtaatgactccacacccagttatcagccgagttggtgccacacctgtccggtatcttttctcagagatgggagtacgataccaacccatatgcaatcagacatgcccttcatgaagccgagaacgctgacttcaagtgcagtacttcgtctcgcagcctgagtgggatgactgcttagctctttgatacttttagccaagtctgaggtgactgccctgcctccagggctgcgaaggcttgtgcaatcatggccattacttctctgctgtgtgatcctcatcacacagcatacacagatacaccataaggctatgaaactaactaggataagcattcctcccagggcacccattcccgcccactctttcagatgattcatggcttgagtgatccacgaagacagtccttctgcaaccgagatgtcgaccctggtggaattcacgtgcactatggagagtctcagctcctgcatcaacttgtcaaaatccccagaccagtagcctagaagatactgtgaaggttgtttagacatatttgctgctaaagaataattctgataggaaacagctgctacacacaaaccaggcaatctccattcatatcccaactgtgccagttgccataaagtatccatttgttcctgtacaagatcaatgcgttgattcaaaaccataatgccacctttcaattgagcattaagggtagattggatatccaacacaatctccatatgctaagtgcagtaatttcaactccttactaattaagagaatgtcatccatatagtggacacatctcacagcagggtatttctctctaataggagcaatagcatgacacacaaaaagctgacacatagtggggctattggccatactctggggtaaaaccacccactcatataatggtatggagaatagaaggtaaagtaaaagcaaacctaacactatgctgcacacactacaaatcaggttcttcatgattgggtagggctgacagcaatggtaaaccacgctgcacaggccccatgacatggatctgtttatttccttcagctgttctaacgtctcctgcccctcttctacagccttgcggcatctttgatcctctagacaactgccaaccattttccaaaagggccgcgtgcctggcttcagcgttccctgtgcccaggcaaaatctagatcttttccaagcttgtcccagcaactggtggttaaattaccggaatcagcaaaccagggggctaccacatcaacctcttggataaatctctcataagtacttttctttaatttcaatcccttagaccgtaacagctcttgaagagcaatgaaaattggttgcgttgttgtggttcccatactttcacttttgcttacctctactttgtcctttcccggaaccttatcgctccacactggagaccttatcgcctctttaccgaggtccttaacttggtcccaacttacctgggacttacaagtcgactgccctgactgcaggaagttgtgagccgttcacccgcagaggttcccagtatgggccaccacttgtcgagcctatctcgaccagcaagaaggacacgaccacgactcttcttcaagcagtttattcaggaaccttgtacattagcttctacatcaacttccttagctttcctccatccgcttcttctctctgcttctctatctcccagcccctggcaagcccttaaaagcaagctcattacccaattaactcacgccgcctggcaatcccggataggtcacagctggaggaggcacaccagatccactaagcgcttccaaataaggcttgtttacagctaagctcggtctccctggcatccagccaggcgccatcttgagactgtggctccccacaggtcacgtttcacatctgaggaccactactttatcttactatttaaatagtggcttagttgagcttcaagtaggctcaaggaggatgtctttcaagtatgtatgggtaaatacataagatatgtatacaaaattgtatgccaagaattgcttttagagccccaaatttcaaaggtatggaattacctgaaaggatcatcctggggagagctaagagaaatgaactttatatttttgcatctatcagtcatttctcaaggggtaaaaattgaagataaattcctagccacttgtgacccctgtgtgcacaaataaaggatgttctaccaacctgaggtcaatttgctcagaaagtgatgaaggtcaatggcagtggtggcacacacctttaatctcagcactctcaagacagaggcaggtggatctctgagagttcaaagtcagcctggtctacagagtgaatccaggactgccagggctacacagagaaaccctgtcttgaaaaaaaaaaaagattttccaccagaaacctcctacagttgatgtcttacttactattctattgttgtgaggagacaccatgaccaaggcaatgtataaaagaaagcatttaattgaggccttgcatacatgtaagagttttagtccattatcatcatggcagggagaatggcatcaatcaggcaggcatgacactggagcaatagctaagagctcacatcctccatgactcttactactttcctgaattccatgaacaatccagtttaaacacacattcctaaacatttgaaacggactcccatatatgagaaagagcatgtgaagcttgtcttttggggtctgggttacctcagtcagaatgattgtttacagctccatccatttgtctgaaagtatcataatttcattttttatggctaaataaaatatcattttaaacatatgacacatttttattattcaacagttgatagacatcttggctgcttccatttcctgactattggaaatggagaagcaatgaacatgtgtcccgtgctaccgtctcaccagcaaaaacgacgcggcacactcctcaggatccttctgcagtaaagctttaatgcgtcttgagagggagagcataagcttacagagcggacactccgaactcccaaaaacccaccccttatatcggctggcaaccgctgcctcggacgtgttactccctgactggctgaagctcatcggaccatatgacatcagctgatcggaccatatgacgtcacgggagaggcggagaccaagggatggaaagttacaaagttacctagtgcgcatgcgcactagcttgtaacggctccttacaaacatggatgggcaggtatcgctataatggaggaggatagattgcaggtgctaagaaagggggaggaacaatagaacactaagggttaaatggggagaggagagcaggatgtaggacggtgagtgagtggatacccaacactaaggacctttgggaaagtcatattgaaaactgctccttgaactgttacgtgttactaggcctggcaggctctagaaggcaagcacagctcctcccctggactttatatctggggcaggaagaattcatccatgagccagcccagtgcctctggtgatgggctgttgggtaccattatgctcttccaaccgaatcatctcacccattcaaacaactggacaaatgacttttgcttgaagctgcttgctgtggcccagaagagaataaaagaaccttcacaatgccagtaagactgagcaggaaacaaagatgcacatgccaggccggggctctctgccctgggcctggaagaaagaacacaggcccacccagcacctgatgggctggctctattatagtgagcatatatatgggggagtttatgtaagacagagagagtgatagaatagttcatgtcttgtggagagaggcagatcccaagaggagaaaacagtgaggaccaggctgaggtgggtggctggtttgccatcccaggccatggtgatatccaggcttgagctgcagccaagggccatgtctgcacctgtggccttgctgcagctatttctgtgttgatgtccttggctcctgttaccactgagggctgaaaggacagggctccacagagacggatctgcccatcactggctgcaacactaggaagaaatgatcctacccctcactggctaaagcactgaagaaagcaagcaggtcttgtacctctcttgggcatcatgacagagttgaccttgctggcaggctggctctgagagcataagagtggggggggcctgaacctcccctttcatctgccatgtaatgctgtgggcaagggaaagatgccctctcctcagcacccctcaccatctgttggcagacaggaaacccaacctagcccccctccagctgcagcactaggaagaccagtcattgcacctcacctgggcagcacagtggaactgacccttttgacaaggatatgtgctatcaaaaactttaaaagtccttgcttctagggttttcactcagggctcaaaaaaaggaactacaaataagtgaaggaactaaaatctgtgggggaggaattgactcacacataattgctcctctgcatattcctttattcttttgttcttttgctctctttctctcttgttgtatccctttcttccagttcttggcagtatagaatatatatatatatatatatatatatatatatggtttgcaacagtaattcttttgccatacaatgtgaggactgagtttctcagggtcagcaaggcagataagatttacacacagagcaataaaccaaaactgctaggagaaacaattgcttagggctgtaggtcaaggagggtctaagtttaatttgcacaagaaacaaaacctggaaccttacagtgctctggcctcaatggcagcacaggcttcaagaaagtttttcttttccctgaggatgagcaaatgggctgattacctttgtctttatctattacgataaatctttccgccaaaagccacgagccccaccgccatgtgtgtgctttacgccagtcacccacccaagttagggcccaaattaatgcacagaaacttgtattaggttcaaatgctgcttggcaaatgactaggatttctcagatgagaaatcttaattatcataaattatatatattttacaagacttatcttatagaggatgcctttcgctggcgccctctcttgccagtggctcacatcccaccactggaggatgcgaaggggaaagggggacacttcctgtttctcctttcttaaatatgagtctccttgctatgtcacttcctgcctggaacaccacttctctattacatttcccagaatcctctttgactcctactcctgcctaacttgttgtttcattggtcaaacagaactttatttaacaatcaataagataaacatacacagtacattccccatcatttatcttctcaggggaaacataagcagtaaatctctgagctaaaatcttaagttaatataagaagtttgagaatcttttagtgcagagatagtttaggttatcacttctctacctgtcagtgaggtaaaacctgggcatgcttattttttctatgcatctagacagctatgaatcaacaactttgggcatgtagtaatactatgtccttggatatcttaaatggaatgtttttgcctgggccctaaactctgaccaaatgcctgtcaataaggataattgcaggaaggcagatctctgaaattacataggagaggggaacaaggacctggtgttgggaaacatacctaaggaatgtaatcagtaactaggatctgttaatggagaacaggcatttacataaagctgggggaacgtaatcagtaaactccaaatgcatgggagaaattgttcccagcaaatgatcagatagtgctaaactgtgggaagtaaatctcaagtttgttgcagaaaggaataaactacaggaagaatctacagcaagaaacagctacatcactcacaagactataaagccaaatacaacttttcaattggttttatccgtcagaagaatcctaaattcttctgagttgtctcatgatatgatacctgtataattactgtgtgatcttgcacttgtagcaatggatgagttggccctgtgaatatgagcatgggagatctggccccacccctcatctaacaaatgggaaatgtcctcccttcccctacccactacttcatgtggcaggtgggagagctggcccaaaggtcatgagaaccagtcgtccggcccaacatctcacaggctgcagcactagggagagcaggccttgcacctcatcttagcagtacagtagagctgaccctgctggtgattgggtgggtaagccgaccatgagtgcacaaacatgggagactagcccaacatttcatctgtcatacagtgtgggtcagagggtgatgctcccccattgcccctcacccctcactgcctacagcactctaaaagaggaggccctgcagctcacctgaacactacagtagtgccgaccctgccggtggggacacagatcaagcttgccctgaggtcattagagtggaagacctggccctgcatcccttgtctgccatgtggtggtgagagagagggaaaatgccctccccccatcccttgtcacctgcccctgcctctcaacagatggaacactagggagagtcaaccctatacctcccctgggcaacatagtaaagatgaccctattgacaggtgtgggcgagctgtcttcaaaatgtgggtatgaaagatcgggccacccctcatccactatatagtgtgggcaagggagagaagacccccccattactgtcttgggcatcacagagctcaaaagaaatccacagagttggcatagaagacttttctatctgaaggggttagggaaaaacactctcttttgatcatttctttctttgttcttctgtgttcttatactgtattcttttttctatagcttatataccccaacaaaatctttcaggcaatacagaattacaatgtggttacattctatttttcaagtgaatgattataatgaatacagataaaaacatgtttttcatctcccttacatgattaaagcaaagtcaccccaataacccatataatttgcatctaagtaacttgttacatattaacagactatgagcaagcagagggtattttttctcagccaattcttttgttggcaggctacatattatggttacaaagaaagattcaattactttattacttatattgaaaggttatcttataaggaatcttaaaggaatcacaaaccaaaacttttagacataaaaaaatcaatcagtcagctatattttaaaatatttagggtgcatacccactcattgatatatatgtattctgatatatatatatatatatatatatatatatatatatatatatatatatattctgatatagatcagaagattgagggcagaaatgggtaaaagaaattaattatcgattccaccgaccaacccaggaactaggtgagtgagtcgctgccctttccccgactcccgcccaaaacatcattcaccctgaccaccgccacccccccacccctgcctgtacctgagggcttggggtagacacacccaggcagggaggagctccctgcgccccaaatctgctagctccccactcctccattccaccgactgacccaggaactagtgaggagactaccaggatagatagagaggccccacctgcacccactaaaagaagatatggggagaagacagaataagatttcactcaacaacagaaagaccaatatgacaccaccagaatctagggactccattccagcaagatctgaaaagcccaacacagagcatgaagatgagatggacctcaaaaattatctcagcaagatgatagagacctttaaagaggaaacaagaaaatcccttaaagaaatagaagaaaaagcaagcaaaaaattacacgatatggaggaaaagacaaaccaaaatattcaagaaataaacaaatctcttaaagaagctaaagaaacccaagataaaacaaccaaacaagtgaaggaagctcttgaaacagttcaaagcatgaaagctgaaacagacacaataaagaaaacacagaatgagaacatgctggaaatggaaaggctggataaacgatcaggaactaaagatgtaagtataaccaatagaattcaagagatggaagagagaatctcagctactgaagactcgctagaggatatacattcatcaaccaaagaaaacctcaagtccatcaaatccctaacacaaaatgtccaggaaatatgggacactgtaaaaaggccaaacctaagaataataggtgtagaagaaggtgaagaaacactgctcaaaggtacagaaaacatattcaacaaaatcatagaagaaaacttccccaacctacagaaggatatgcctatgaaagtacaagaagcttacaggacaccaaaagactggaccacaaaaagaagttcccccgacacataataatcaaacaccaaatctacagaataaagagaaaatattaagagcagcaaaggaaaaaggccaagtaacatataaaggcaaaccaatcagaatcacacccaacttctcaatggaaactctgaaagccagaaggtcttggatagataccctacaagcactaagggagcatggatgtcaacccagactactgtacccagcaaaattttcaatcactatagatggagaaaacaagatattctacaacaaaaacagatttaaacaatacatatccacaaatccagcactacagaaggctctggaaggaaaactccaacccaacgaacataactacactcacaaaaacactgacaatagataatctaattttagggcaaaacccacacgcaatgacaccaccaacaataaatccaaaacaaagaagaaccaatgaacaatggatattaatatctctaaatgtcaatggtcttaacttacccataaaaagatataggctaacagaatggatacgaagacagaatccatccttctgctgtttacaagaaacacacctcaatttcaaagacaggcgatacctcagagtaaaaggatgggaaaaaattttccaatcaaatgggctcaagaaacaagctggggtagcaatcctaatatctaacaaattagactttaaactgaaagcaatcaaaagagatgaagaagggcatttcatactcatcacaggaaaagtccatcaagatgaagtctcaatcctgaacatctatgcccctaatacgaaagcacccacatttgtaaaagaaacattactaaagctcaaaccacacataaaaccacacacacttatagtaggagacttcaacaccccccttacaccactggacagaaccactagacagaaacttaacaaagaaacaaaggatctgacagaagttatgacacaactgggtttaacagatatctatagaacattccatccaaacacaaaagaatataccttcttctcagcgccacatggaaccttctcaaaaattgaccacatagttggcagcaaagcaaacctccacagttacaaaagtattgaaataaccccctgtatcttatcagaccaccatgcattaaagctagaattcaacagcaatacgaattgcagaaaacctacattctcgtggaaaatgaataacacccaattgcaccattcctgggttgaggaagaaataaaaaaagaaattaaagacttcctaaaatttaatgagaatgcagacacaacatacccgaacttatgggacacccggaaagcagtgctaagagggaagttcatagcactaagtgcccacatgaagaaactggaggaaagtcacattagagaattgacagaacaactgaaagctttagagcaaaaagaagcaaacacaccaaggaggagtagacgccaggaaataatcaacctgagagctgaaatcaacaaagtagaaactaggaaaacagtacaaagaatcaatgaaacaaagagttggttctttgagaagatcaataagatagacaaacctctagccaaactaaccaaaaggcagagagagagcatgctaattaacaaaatcagaaatgaaaagaggtatataacaatggacactgaggaaatccagagaatctttaggtcatactttgaaaatctgtattccacaaaagtggaaaatctaaaggaaatggacagctttctggataaatatcacttaccaaaattaaatcaagatcagataaacagtttaaatcaacctataacccctaatgaaatagaagcagtcatcaaaagcctcccaaccaaaaaaagcgcagggccagatggcttcactgcagaattctaccagaaattcaaacaagagctaattccagtactcctcaaactgttcctcacaatagaagctgatggaatattgccaaactctttctacgaggttacaatcactttgatacccaagccacacaaagatatgactaagaaagaaaactacagaacaatatccctcatgaacatcgatgctaaaatactcaataaaatattggccaactgaatccaagaacatatcaggaaaatcatccaccatgatcaagtaggcttcatcccagggatgcaaggatggttcaacatatgaaaatccatcaatgtaaaccaccatataaacaaatgcaaattaataaaatcaggaatgaaaggggggacataacagacacagaggaaatctagagaatcatcaggtcatacttcgaaaacctatattcctcaaaattcaaaaatctaaaggaaatggacaattttctagacagatttcacttaccaaaattaaatcaagaacagataagcaacttacatagacctataacccctaatgaaattgaagcagtcatcagaagactcccaaccaaaaaaagcccagggccagatggcttcagtgcagaattctaccaaatattcaaggaacaactaataccaattctcctcaaagtattccacacaatagaagcagaagggtctttaccaaactctttttatgaggcttcaataacattgatacccaagccacacaaagacacaactaagaaagagaactacagaccaatatccctcatgaacattgatgcaaaatttctcaataaaatactggcaaatcgaatccaaaaacacatcagagaaataatccaccacgatcaagtaggcttcatccagggatgcaaggatggttcaatatacaaaaatccatcaatgtaatctaccatataaacagactgaggaaaaaaagaaccacatgatcatctcactagatgttgaaaaagcctttgacaaaatccaatagccctccatgataaaggtcttggagaaatcaaatcaaggattacaggaacatacctcaacataataacaatatacagcaagccgacagccaacatcaaattaaatggagagaaactcaatgcaattcctctaaaatcaggaacaagacaaggctgtccactctctccatacctcttcaatattgtccttgaagttctagctagagcaataagacaacaaaaggagattaagggaatacaaattggaaaggaagaagtcaaactctcactatttgcagatgttatgatagtctacattagtgacccgaaaaactctaccagggaactcctacagctgataaacaccttcagcaaagtagcaggatacaagattaactcaaaaaatctgtagccctaatatatacggatgacacattggtagagaaagaaataagagaagcatcaccctttacaattgccacaaacaacataaaatacattggagtaacactaaccaaaaaagtgaaagacctgtacagtaagaattttgagtctctacagaaagaaattaaaaaagataccagaaaatggaaagatctcccatgctcttggataggcaggatcaacataaatggcaatcttgccaaaagcaaattacagattcaatgcagtccccatcaaaatcccaacacaattcttcactgaccttgaaagaacaattctcaactttatatggagaaacaaaagacccaggatagccaaaacaaccctgtacaatagaggaacttctggaggcatcaccagaagttacagagctatagtcctgaaaacagcttagtattggcacaaaaatagacaggtagaccaatggtatagagttgaaaaccctgattttaactcgaacacctgatttttgacaaacaacccaaatatatacactggaacaaagaaaacatcttcaacaaatggtgctggcataactggatgcaaacatgtagaagactacagatatacccaagcctttgtccctgcacaacacttcagtcaaaatggatcaaagacttcaacataaacccagccactaaacctattagaagataaagtgggaaatatccttgaattaattggtacaggagactgcttcctgaacatgacaccagtaggacagacactgagatcaacaattaataaataggacctcctgaaactgagaagcttctgtaaggcaaaggacacagtcagcaagacaaaacagcagcccacagactgggaaaagatattcaccaaccccacatctgacagaggactgatctccaaaatatacaaagaactcaagaagctagccaccaaaacaccaaacaatccaattaaaaagtggggtacagaactaaatagacaattctcaatagaggaatctaaaatggctaaaagacacataagaaagtgctcaatgtccttagccatcagggaaatgcaactcaaaacaactctgagataccatcttactcctgtcagaatgcctaaaattcaaaaacacaaatgacagtttatgctggagaggatgtggagaaaggggaacacccctccactgctggtgggagtgccaactggtacagccactttggaaatcagtatggtgactcctcaagaaaatgggaatcagtctaccacaagatccagcaattccactgctaggcatatacccaaaagaagcacattcatacaacaaagacatttgttcaacgatgttcatagcagcacaatttgtaatagccagaaactggaagcagcctagatgcccctcaactgaagaatggatagagaaaatgtggtacatttacacaatggagtactactcagcagaaaaaaacaatggaatcttgaaatttgcaggaaaatggatggaactcgaagaaaccattctgaacgaggtaacccaatcacaaaaagacaaacatggcatgtactcattcatatgtggattttagacatagaataagggattgccagcctacaacccagactgccagagaaactagtaaacaaggaggaccctaaaagagacaaactttgtcccctggagaaggggaaagggtcatgatccctgagcaaattgagagcatgggaagaggagggagggagctatgagaatgagaagggaagaagaccatgaaggatgcaagggtcatgagggagcagaaagggtgagtcagggaaagaatagaagaaacaatatgcaataggtagggttttagttgggggatggtaggggaggaagggagggagaagggaactgtgattgtcatgtaattcaatcttgtttgtaattcaaagaaaaaagaaaaaaacaaggtattgtatgttatttgtggctattgtaaagctgatttctttttcagcccatttattgtctatacatagtaggactttggttttttttttttttttttagttaatcttgcttgcatcctgccactttgctgaaagtgtttagaagctgtacaagttccctggtggaattttttgggtcactcatgtaaattgttatatcatctgcaaatagtgaaagtttgacttcttcctttccaatttgtgtcctcttgatctccttttttgtcttattgctttagctagaacttcaaatacgatattgaagagatgtggagagagtggaaagccttgtcttgtacctgattttagaggaattgcattcagtttctttccatttagtttgatgttggcttttggtttgctgtgtattgcttttattgtatttgggtatgttcctgttattcctggtctctccaagacctttatcatgaaggggtgttagattgtgtcaaaggtttttttagcatctagtgagatgattatatggcttttctttttcagtgtgtttatatggtggattacattgatggattttcatatatggaactatccctgcatccctggcattaagcttacttaatcatggtggatgatttttctgatgtgtccttggattccatttgccagtattttattgagtatttttgcatcaaattcatgagggatattggtctgtagttctctttcttagttgtgtctttgtgtggcttgagtaccaagataattgtagcctcaaaaaaagagtttggcaatgacccttctgcttctattgtgtgaaacagtttgaggagtattgatattagctcttctttgaatttctgaaaccatctggccctgggttttttttttggttgggagacttttgatgactgcttctatttcattaggggttatagatctatttaaattgcttttctgttcttgatttaattttggtaagtgatatctagccagaaaattgtccatttcttttaaattttccaattttgtggagtacaggttttcaaattatgacctgatgattctctggatttcctcagtgtccattgttatgtcccccttttcgtttctgattttgttaatttgcatgttctctctctcccttttggttagtttggataaaggtttgtctatcttgctgattttctcaaagaaccaattctttattatatttattgtttgtgttgttttctttgtttctattttattgatttcagtcctcaatttgatgatttcctgacatctactcctcctgcgtgagtttgcttctttttgttctagagctttcagttgtgctgttaattctctagtgtgactattctccagtttcttcatgtgagcacttagtgctatgaactttcctcttagcactgccttcaaagtatcccataagtttgggtatgttgtgtctacatactcattaaattctaggaagtctttaatttctttttttatttcttcctcgacccaggaatggtgcaattgggtgttattcaatctccatgagtttgtaggttttctgcaatccgtattgcttttgaattctaatcttaaagtgtggtggtctgatgagatacagggggttattttaattttttgcatctgtggaggtttgctatgttgccaagtatgtggtcaattttagagaaggttccatattgggctaagaagaaggtatattcttttgtgtttggatggaatgttctatagatatctgttaaacccagttgggccataacttctattagttcctttgtttctttgttaagtttctgtctggtggtcctgtctagtggtgagagtggggttttgaagtctcccactatatgtgtgtgaaggtttatgtgtgatttgagtttaataatgtctcttttatgaatatgggtgcctttgtatttgaggcatagatgttcagaatagatgttgagacttcatcttgatgggcttttcctgtgatgaatataaaatgaccttcatctcttttgattgattttagcttgaagtccaatttgttagatattaggattgctataccagcttgtatctgggtctatttgaaaaatggaaaatcttttcccaaccctttactcagaggtaaggtctgtctttgaagttgaggtgtgtttcttgtatgcagcagaaggatctttgtatccattctgttagcctgtgtctttttataggcgaattaagacaattgattttgagggatattaatgaccattgattgttaattcttgtttgttttggatttgttggtgatggtggtattgtgtgtgggttccctcactccttttttttcttttggtgtttggtaacgtggtattatctatttcctatgtttttgtgaatatggttaatttccttaggtggagttttccttctagtattttctgtagggtttgaattgtggatatgtattatttaaatttgttttttcatggaatatcttgttttctccatctatattgattgaaaggttttctgggtatagtagttgagctggcatccatggtcccttagagtttgtacaacatctatccaggaccttctggctttcagagctttcattgagacgtcaggtgtaattctgataggtctgcctttatatgttacttggcctttttcctttgctgctcttaatattttttccttattctgtaagtttggtgttttgatcattatgtggcaaggggacttttttcatggtccagtctatttggtgttctgtaagcttcttgtactttcataggcatgtccttctttaggttggaattttttttctgtgattttgatgaatatgttttctgtacccttgagcttcttctatacctattatttttaggtttggtcttttcacaatgtcccatatttcctggatattttgtgttagggatttgttgaacttgagattttctttggtcaatgattctatttcttctagtgagtcttcaacacctgagattctctcttccatctcttgtattctattggttatacttaaatctgtagttcctgactgtttacctagtttttctatttccagcattccctcattctgtattttctttatagtttctatttcagctttcaagacttgaactgtttgaattgtttccttcacttgtttggttgtttcttcttggtgttccttgttttcttttagagatttgtttatttcttgaattttttggtttgtcttttcccccatttcctgtatttttgtttgttttttcttccacttctctaaagtattttctcatttcctcatcgaaggtctctattatcttcataaaattgtttttaaggtccttctcttctgcttcatctgcattgggatgttccagtcttgctggtgtagagtccctagattctggtggtgtctcattggtctttctgttattgaatgtgttcccattccttcttccagtggggtcaggtggagtctctcctctcctcttgtctcccaataggtgtaggtgggccaagtcttcgatgtcagcaactcgggatggtccagcctctcctggtgttctcctcacacagagggcataggggagtcaagactcaagctcaagctgaggaagttggggggccaaggctgggatggaggcagactccagtccaccatctcaattgtttttttatcactaacttgagctgtgttctataaaactcataggccctagctgtgtaataattccttgtatatgtttttattcatcaaaactctatttaaactaactttattatcaattagacagtacagcttaggaaggaatcatctccataataacccacaggtaaaaatgcccagtagaacaggatgtttacatgagataaacacactacattataggcagtggggatctccccccacccattcatcccatgccagataccagagaaagatagcagcagcaaacatgtaaaggcacagcagaagcaaagacattccagggtctgtagtctcagagccctgcctatctgagattcacccatcagggagttgcttcctggtgggctgacacctcaaacttcaattgttacctactgctcctctggcatggccactggcaccccccatgccccttgaggcctgtggcaggtggaatatccgtcactgaggtcactagagtgagagagctggccctgcctctcaccagctgctgcagagtagcccctacaccttgcctaggcaacacagtagagctcactggggtgctacaggtgtgggcaagccaaccaaaaggacatgagagcaggaaaattggccccaccccttgctgcttactacaaaggatgagctagccagggcggtgctggagagctcttcctggtgttgaggatgagggaaagctggtgggtttaccaacccagaaaccacacagacccagaaccagggctataacttgtcccatcccatcacacatcccatctatgatcttctggagcacatgaaggggctggtcctgcagacccaaagttacaggatctccatgacacaggacaacagcaggatatccaagaggagccccagtgagggcccagtattgattaacggatgtagcagaaaccagagaccccaaaccagatcaatgactcattgcaatgaatacttgcaagtaacaatatatggactaaaggactgtgtgagtcactgtgtcacactatagcttccacaagatttttctagtcttttcttttcttttcttctctcttatattttcttttaaattttatcttgttttatcctcagcctcaggaggtttcaagagtagatagagggtagatggacaggataggtagatgagtggaatggagatgcatgatgtgaaatccacaaaaaaaaataatcaagaaaaaaagaaagaagtttactaccataaaaacttcacaaaatgttcacatatacacataccgagtttagatggacctgccccatactaaggggagagtgcctctccctcagtgtctacctttcctttccattttgtggcttccttttctgtgcagaagcttcctagacatgcagtgtattccctactttccttgtccctgtgacacatgtaactgaaggagtgaaagatttactatgaatcacggtttcagcacatcctggtggagaaggcatgtcagacagtggctggccagctttgaagcacaaggctagactgagatagataagagtcagatataaactgtgaagaactgctccacagtggccagcatatgccagtgaggttccctgtccataagatttcacaactttccaaacagctccagcagctcaagagcaagtgttgaaacatgagcacatgtgggcattttaggtttaagccctactatagtcttactggcacactttttcttttcagacctaaactatactagaacttccaagaaatcattgtcaaagagctgaagttgttcttaaagattttcttctggaaaatttttagtgtcagattgtaagcacctttgtttacttaccagggccaaggccacctgatatagccgtgaagaattaaatcaggctggttggaggggccataccacaactgagtctgtgaccattttattgagaacactcaaacttctcatatatttattaaagacagactatattggcaactgccaggatcaatatagttatagttgccaaggtacaatgaagtttgcaagacatacagggtccacaagattaatgtctaaaaccaattgtcctgtcaagtcttcattctttcttgactactaaaggaacatacagagaaacataaagcggcctaaatgtttcactgcctgagggaatatatcagtctctcaggaactggaagatcaaatgtgcaagaaaattatgcatcagaagtaaaagtgctgtggaagcaagaaagtgcatccacacccaatttattatcaacctgtgttactaactcttattccattttggaaaactctagccttgtgtttttcctttggaaactgagagtttaaaactagacctgtgaatgtatatgctccaattcaaatgactctaaggtcagccagagattataatgctagaaccattattagatcaaggaaagggagcatgggtccataggaacatggaaacatggatccccaaacctgcagggacagctactccatgacaaccaggcaccagagagcaaatgccatgagtgagttctcagtgtaaggctctcctcatccacctctgctctccatgacacatttaagaggatccccagtggtggccatttctcctgctatacatccacagtgactctgtgcacccaaaagaactatctaagaatgaagtaagcccactaaacagtaagcttgatgaagaaatggtaatttcaacctttgtagctccttgaatctcagtgactgaacgatgttccccataacacccatggggtgacagcactctttgaagaacaccctgttctttctttcctctcccttacttccttaccttccacttaggactcttccttgggttctttttctcttgattcaaattctctgaactgtaaaaagactgctcaggaaaaattgaggcattaccatgaggtaagtaatagtgttgaattctagttatctgttaccttgaggtatgaccttgaatttcgttactgtcttgctttttcacccacaaaaatggcaataatgggaccatctaggtttgaataagaaaatgtatatgaaacatgacttaatgtaaaagtcaggaattgggaatttaatcaaaaaacagcaatttactaagtttcagggggaatttcctatgacaaaaacctgtttgtctgggtttaccatttccccctcccaaaggacacttttaattttttcccttgggggttttactttgaaagtcatagaaatttaatttccatttaaataaagggcattgactcatgactgctgaggatggaagacaacaatgagtggtgataacatggcagtgctcacgcacaagtcccttagccctgttgttcttgagcccgagtctagaacacaagcccaggtaacacagtcatgggaggtgcccacctcgggcagacaaaactggcctggtagtccctctgaagcttctttgcttgaagtcacattgaacagtagccacagctttgcgccagtctacctggccatgttttcattagaacgagattggcaaggatctcgattaactagatccacagaacgaaacctcccaccagtgtttatactagtgctcacaccagtcggctcttgtgtcactcatttgagaaatgctgaactcctgcaaaacccacttcaaagagagtgagtatatttagaaatattttcctttttctccagtttttctaaattgtaacacgaaaaatgtcaagataattatgtggtttaaaaaagaaaaagaaaagaaaagaaaaccaccctcaactggtcattctttttcccctctgaactaaatgggataccacaaggttgactgccctgtcatgaaatagtactgagataagtgagctgctggatcagtttcacctgctgttgatgatttgagagacaaaacctgtgaaagtgcacaattaaaagattgctttatttgatctcatatacagtgtgtactcagaaattgtattagccacactttaagagtaattatcggtacattaaatcatgtactaaattgtcattacattactgacatctactaaaatgtcacactgtttcccacaagtatgtacaactgtgtgtctattgaagatgaaaaattttaaaaactagtaaacagaaagatccacaacattcttaaaagctaaataaaaattaaaccaaaatatgttatttttagcaatttgtccaaagttgggtttatttttatattttttttatgtctgttggaagttgattacaaaatacttgctatactttcctataccagtatctaggcatgagtctcacaaaatgaaatgctgtctttgctaagatattatagactctgaaagcttgctgcaagcttgtcctttagtccatttaaacagaacatttctccaatggtgagaagaaaatttactaatgtgtttaatcatgttagcattagtgtatttggcgcttattatgtagtagtgaaacatccagtattcaccacatttaatgtttggtactgtaaattattcatgtggtatgtgagtgagggggtatgtatatgtgtgtgacagagggattatataagaattgtttcttcctgtaaagtacaacactttgagcatttatttttatatcacaggtattactatagtatccttttcaaagttgatttgtaattgcttttttccaaatttactatatttctcaagacagggtctcactctgtatccctgctttgcctgaaacttattaaatagaccaggctggcttcaaactgatagagattcaccagcctctgcctcccaagcactgggattatagatgcgtgccaatatttctgcctccaattcactgggtttttttaatgatttatttacttatttattaaattttcatgtatttaaacaatgtccttagatcatacctccttctaatcctccctagagaatctccacattcctctcccaacttcatgccctcctttatttatttatgttttggttattaacaaccccagagtctaattagtgttgcactatgcacatgggtgtgtggccatccactggggcacaagaaaactatcagtggccagttcccataggagagtgactccccctcccttgggagttagaagctgctaggagctctcctgccaagagatttaaatcctatttcctctaagactgttttattgcaatgaatctgaaatgtattttctacttcaatgtcatataatgcatcaatctatttcatccttcaattagttcaaatgtaaggactagtaagttctcacatagaatttgtggaagagtttttcttttccctattaatttaaaatactaaaattagcatattgaaaaatcttaccaatatttacatttatttataaggtatttgttctttgggttcatgcctgctattctaagaatggtgaattatcaatgtctatagcatgtattagtatctgaaagtactttcttcatcttttaaaaaacgtttgcctgttgtcactgtctgtccctttcttctcaaggtaggacaaggagtctaaacaataggctttaccaataattctactgttagtgaatcccagctcaagaattgtataaaaacgattataactccatgattttggaaaatgaaatatttactttgatcctttctctccattaaggtcaatcctgttatgatgctggttgtcctgtgatcttttccacccaaagccaaacaaactaatcaaaagataattaagagggcacctgtcttcgtgacccaaaggagttacactttcatgggccaatgtctcaataggcttctacctagaacaagtgtgcctcactgtccacatgactgataagagaggtctcaatttctcaaaaaagaagaaaccaaatccccaacgtttctatcagagccacagctgtcactcatgattgatcagcagctctcaatgacaacagccgttacctactgagaagtatctatgtgccaggttgtgtactgtgcactggcctccattgtcagccatgactgtcgctgaaaacatttgaggatttttgttgttatcatttttattgatcaagtcaaaataagtatcttagcttctttggacagtttaacagagggctcgaacattgcgagcactctaaactctcaacacctcaccacaactcatgacatttttcaagaagcaacatacactaccattgagatgatcttggggacatgaaatagtgaggtatactctcctccttcagagtattttcctgtgaagtctgctgaggaagactctgtacatggttccactccaccaaaacacagcagaattgtaagttatagtattttccagtttggagatgtaaatatacttataaagacctttagaaattatcataaatatgctaaattatttcactttctttgtcagaagggtagaattttcttttccttttatttgagacaaagtctcaccatgtagtattaactggcctggagctagactcacgaagatttgcctgcctttgcctccccagtgctgggatttaaggcatgagccaccatatccagttctagtcttcttatttttttaattttttgaaaatttcacacagtgtgctttgatcatatgcttccctacctcctcccagagtcttcttgacaatttgagaagaaagactgggatctttccacaggtcaatgaagtatttcttcattttcagggattataagagacaaagacagatggtgtggaaatagtaattactatagtttcaccttggtcaactacgtactttcttgtctcttttctgatcttaggaacactaaggaaatgagtccaaggggaaacagcaccaatatcacccagttcatcctcctgggattctcagatttcccccaaatcatagcactgctctttgttatattcctgctcatctacattacaactctgacctggaacctgtccctcatgttttaataaggatggattcccacctccacactcccatgtatttcttcctctgtaacctgtccatcatagacctttgctatgttacctgcacggtcccaaagatgctctcaaactttttccttgaaaagcaagctatcagctttgtgggctgcattattcagaatttcatcttttccaccatagggctaagtgaatcttgtctcatgacagccatggcctatgacaggtatgctgccatttgtaacccactgctgtattcatcaatcatgtcacccactctttgtgttctgatggtgctggcatcctatatgtctgggctcactgcttctttacttcagttgtttgctttacttcgtctccatttctgtggacctaatgtcatcaggcacttcttctgtgacatgccccagttgttagttctgtcatgtacagacactttctttgtacaagtcctgactgccatattaacaatgatctttgggtttgtaaatgtgctagttatcatgatatcctatggctatattgtcttgtccatcgtgaagatcacttcatctaaaggcaggctcaaggcattaaacacgtgtgcttctcacctgacagctgtttccctattctatacctccagtatcttcgtctatttgagttcaagttctggtggctcctccagcttagacagatttgcatctgtcttctacactgtggtgattcccatgttaaaccctttgatatacagtttgaggaacaaggaaatcaaagagtccatgaagagattgcagaaaaaggcaatgtgtagctaaggacacgaaatctggcattttcaacatattatgtcctgtcatagtcactgttgcccataatattatgtatgtggctagaacactacaaaattcatgagactttgtaggaagaagttttactttgaaacagacaatatgcctgtgtgaatcaattgatttgatgctatggcaacacagcatctttaagacacatagggccatagcttctatgttacacaatggccatcattcattgtcctatacataggcatttgagatgcatcaagtttacaaactttttgtacaagactgaagattgctaactcataggactgtgcccacagagaaaattcccacaccagggatccaaaaccttgtgccactagtatcatgacatcgtgttctaaagacaagatcagaccataggctgttctgaacaggtgaggacttcctatttggaagaaatagagctgtacaatggaatatatatataagctgccttctttctaaggaaattattgctaagaactagtaactaggggatcatatacttgtatccatcaaccatagcctaagagaaaaggaagtggttttaatcatggagactggtggcaagaaagtgccatttacttagtatctcaatggcttgtatctggcatctagaaaagtcatggccaataaccatatctgagcaacctgagggaccctgccatttctactgtcctacactaaagccagacagtttgccctgatttggcatagacaactggatcaaacaatcaaaattattttaatatttccagcatctggtcaagtttgctctaagaagacacatgtgtcttcattgcactaatggtcaccaaataatattacagatattagcttcacctgaaatactagcacattcatgtgtgtggtcaacattctccatcctaatgttctatggttctggggttgattctagtagaataataaaaactagactgatgaggtggttcagtgggtaaagctacttgccaccaaatgtgacaacttgagttctataccagggtcctaaaaagtgacagaacataataaacactgaatattggcatctgacatatagccatgtgtcatgacactccagaggcatgaatgagcttgtatacacgattattaattactgaaaattggacaagtgtactgctcacctcttatgtaatcacccacacaaaggagtaatcatttgtactttactaacctatgttcatatagctgattggatcccctgatgtaaaactgagcagggggagccatcctgcttgcacaaccaatgctctctacaccctcgtgcatgatctatgcacaaccttcctgagctcccggggtctcacctttgcagacataaatcgactgtttatatcagagcttcacctcttccattcccctcccaacgctggcaaggctcctgtgtagtatggctggctcgatggcccctcttcccacaagcacaggaatagccacagcagtcactcacaatcatggcttggagcctttgcaagctgggtgtggaagcatctctcttcagagctgccaggccagatggttggctggcattgtctagctggaagacaggcagaccacagacttttatgggccacattctagaagcaaaacagcagccaagttctgaaataaaactatgatgttagactttgcttcagggcctgcacacataggaaagtcaacacgcataaagactggtttggtggtatatggcagggtagtgtttgttctactaaaacttctgtcttacaaatcagcaatctggatgctttttatcttatgcaatcttgaagaagaaagcttgatccacatgatgcagaaaaaggaaagccatacactgactctcaattcatttctgatagctgtgagctgaggaaggggcttgcagggcccatctgacccctgaccttgaccctcagactgcaatgcaagcatcagtgagactccatctgggctgggctgctgctgctgagatgtatgttgtgagcctaaccaagaagactcagcttctgagaagccttgcaccactggcctgctctcctgtcacctcatgtatcctgtgacagatgccactgaccactgggcatgttctttgtgtacctgccacctatttcccttctagttcctgcttttgttacaagacaaagtcggtgttctttctgcatttaacatttttggtgttggtggatttacatcttgggaggctctagaattgttttgtatcacagatgtcgtctttggtggttttccaacagaaggacatgcatgagatttctacttcagccagctaagtacttttatcctaattttgcaagcatggggtggcttgacaccaggcttcccaagagctaggcatgagatcttcctctgatttactctgcaggttggccttcttaataccagcatgctttactttgacttcattgacttattttagttaacaccacattgaattcgaagatcataattgtgtctgcttatgggagccaatgtaatgtttgatttatgtattattcagtgtgaaacaatgatgttttagttgccgttctattactgtgaagagaattgataaccaagacaactcttataaaagaaagcatttaattgggggctttcttacagttttaaagtgttagcccatagtcatcagggtagggagcagacaggcatggtgttagaacaatagttgagagtgtaatacctgatctgcaggcagatagagggagggaggtggagagggagagggagagagagagagagagagagagagagagagagagagagagagagactcacctcctccaacaaggccacacttccaaatacttcccaaattatgcctgtaactgggaaccagcttcaaatatatgagcttatggggagtattctcattcaaactactatagataatgttaaggtaatgaacatatccattacccactttttcctttagcattctatgtgtgctgcttggtctgaaaagggccatgatttaacaactggattcccaaaatgagacatttgaaaggtggtggaatctttgacaggttggatcctaatcaatggtcactagtggtataccatgcaagggcttgtggatgcagtctgtccttctctctcatcctggctcaagatgtgaaccgttttctccagtgtgctccccaccattgccatccaatggccccatgacaactctaaagcaattggactgtcctatcttgcactataacatccagcactgtggctatgtaaccttttgtctttatcagctaatggcttcagacatcttatagacatggataactgactaataaggcatgcatgctaaaaggtaagtttaacagttcccttctcccagctccaaaggtgattttcctcagtcagagaccttagtaagattcagagtaaaaaggggtagagtctcatatccataatatgtctgtgatgttacaaatctgtctctttgggcttctaaaaagaaaaaaatggttttacagtacactcttggtcatcttgttttcagttactaatcgctggacttggtgcttagtatcagaatagtgcctaactccccaaatgcacttaatatttgtcaaattgatcatagtattttaatataaactttagtaatttgactcatacagtcaaaactaccatgttacttatactcagaaaatttcccagcatactctaagaaaacattcaattaataattcccatggaagaaaatcttttggtagctctaaggcaaatgtggttattgttcattatttaatgattcagcatattttactacaacttattttattgcaaagtatatatgaaaatttcataatggatcatagtactctgcatgcaaaatttaaagaactcataaaatagagttgcctttgggatacctccctgcaagttattaccagggatgccctaaagcagccacaaaaacataagctattgccttttcctgtactacaccaccatagcacaataacaagactattgctaaatatacctgtaggcatcttcacttaccagggccaaagtcacctgatatggccatgagaaattaaatcaggccagttggagggtcccaacccaactgagactgtgaccactttattgagagcaatcagactttttaatacctttatcaggagcaaaatataacagcaattgccaggatcaatacagtcgtagttgtcaggatggaatgaaatttgcaaaccctacagggtatacaagattaatgtctaagaccaaatgtcctgttaagtcttcatgcttccttgactactgagagaacatacagagaaacacaactcagcctgaatgcttcgctgcctgagggagtgcatcagtctctcaggaataggaaggcacattgtgccccacaagccatggactctagcctgaaaaaaaaactatgatgcatgctctcgaggtacctaggccaggtcaactccatggttccctgcatattctacccatttttgtttccacctgaacatcgtgccttctccaccaaaataacctgaattcccttaaactgtaagacaaaataaatccttcccctagcatattgtttcactcaagtattctatcacagctataagaaaagtaacaacataggtaggtaagaaaaccccgaaaggagtgattgtttcccagtgcttcaccccaaaaattaaggtagtaggaacctgcacagggtgggcagggttgagaactgagctttccactgaaaatgtaatgcataaaaaaatgtaacaactagatttctaggccagtccttccactctttttgtgttcacacagcctttctgactgcccatcatcactccagtgaaagaccaagatctactgtaatcaagggaatcagtccaggctccatgagccctggaccatgaattatatatacctaggagggaaaactaaaacagaaagataagatcatatttacacagtgaagtgttcgagcccatccttctctcttctactctatcccgttagctcttggagcacttcttgttaggttagtgtctccaaagagacaggaggctcctatgcagagacaagccttcccaagatgaaatgactggttatgcctatagcaggatcccacagatcaacaacaagttcctgtgggatcagtaggagaagcccaaccaaccacaatccatgaatatgaatgtcaagcttcacgcttttatctttaagaaatagagttttttaattttttattatttttaattactcatatttacatatccatccccccattccctcaccctcccctcctcccatgttctccacccaacccaccccaaaccaccaccacccctgactcctctccagggtagtgaggccctctactaaggaccttcaaagtctgtcatattgtttgggggagggtctagaccctccttgctgtatctgggctgcaatagtatccctccatagggaatgggctcccaaagtccatttgtgctctaggaataaagactggctctgctgccagaggagccatagactgtcttgggctcctagctggtagccacattcagaaagtttggtttggtccaatactgtttctccagttttatgactaggatctccattcttatcagtaggtcaggtccactgtttctgaaggtctctccatccccgtcttggctcctttgctcaaccctcctccctctccacagctgaattccagttgtatgtttcagtgcttagctatgggtgtctgttgttgctttgaacagcaactggatgaagactctccttcctctccctgcccccaagctccaatttggtcacgggttcttgttcccatccccttcttcaagggactatgcaatcttctcttgggttcctccttgtttcctagatcctctggcagtgtggaatgtaggctagtgatcctttgctctatgtctaataatcaaaaatgagtgagtacataccatgtttatctttttgtgattcggttacctcactgtggatagtttcttctagttccatccatttgcctgtgaacttcaagattccattgttttttatccactgagtagttctccattgtgtaaatataccacattttctctatccattcttcagttgaggggcatcaaggtcgtttccaggttctggctattacagaccaatatccctcatgaacatcgatgcaaagatattcaacaaaatactgacaaatcaaatccaaaaacacatcagaaaaatcatccaccatgatcaaattggctttatcccaggaatacaggaatggttcaacatatgaaaatccatcaatgtaatccaccatataaacaaactgataaagaaaaaccacatgattatttcactagatgctgaaaaagcctttgacaaaatccaacatcccttcatgataaaggtcttggagagatcaggaataacaggaacatacctaaacatgataaaagcaatatacagcaaaccaacagccaacatcaaactaaacagagagaaactcaaggctattcctctaaaatcaggaacaagacaaggctgtccactctctccatacctcttcaatattgtacttgaagtcctagctagagcaataagacaacaaaaggagatcaaggggatgcaaattggaaaggaagaaatcaaactttcactatttgcagatgacatgatagtttatataagtgacctgaaaaactctaccagggaactaatacagctgataaacaccttcagcaaaatggcaagatataagattaactcaaaaaatcagtagccctactgtatgcagagtttattttttaagtcacttttggtctgaggattttgtagagtcatggaagagatggcagaggacacagagagaaactggagatgcaagatggaagaagaaacaagacaaagctgagtgagaccaaccaacagtatgtgacaaacacaactcaggttagaaggaggaaagcccatctctgtggtataaccctgtacattacagctatagagtggcccagaagctgggagagagagagagagaacgagagcatcagtggctgaacaagcagcccggaagccaggagagagtgtcagtggccaagtgagcatccaggaagcatccatagcagcggcttccagaaactatctcaagaagtgcctctgggaaaaaaaacacctgtgtcccagccaatatccagtgccattctctgtacaagatacccagtcacatcaacaaccattggagcctcagacctgcctgcaaataggggggtgatcaccaaagcactggccccttctgctactggatgagtgaactccagagctgtggccctgcctgtacctggaagagcaaccacctgagccttgggctcccctacacctggaggagcaatcactagaggctctgccttatctgcacctagaggagtgatcatcacagccatagcctccaactgcaccaggtggacaaagagagaccccctccaagcacaggctctgcctgtactgattggagaaagagatgggtagacaacagtgtaaaaatacactcaacaacacaaagagcaatcaatatagcactaccagaaactagtggttctgcaacaacaggacctgaacataccaacacagatgaagcagaagaaaacaacctttaaaaaactttatgaagatgattaagacccttaaagaggaaatgaaaaattcccttaaaaatggagggaaagacaaaaacctggaagaaatcaacaaatccaactaagaatctaggcagtagtggagaggctgcctttgatgcccttcccctatgatgagattgatgactaccttggttaccattcctagagacttcatccagtagctgatcaaagcaaaagcagacacccacagctaaacagtgagccatacgcctggaatctagttgcagagagggaggagggaggagcaaaggagccaaggcagtgctgaagaaacctacagaaacagttgatctgacctagtgagagtccggagaccctagtcgtaaagctgaggaactagcattggaccagccaagccctcggaatgtgggtgccagctaggaggccaagacagtctatgggacctataacagtggagccagtgtttatccctagagcacaaatggattttgggagcccattctctatagagggatactattgccgcccagatacaggaagaagggcctgggtcctcccccaaatgatgtggcagactttgatgatccccatggaaggcctcactatccctgtggagaggatggggggtgggttggggagttggggagtatgggagaatgggagggtgaccgaatgggaggatggatatgtaaataagagtgcaacaaaattataaaaatttaaaaaaaaagaaaaccaagaaaaagcaatgaaacatgtgaagaaaatggttcaagacttaaaaactgaaataataacaataaagaaaacacaaacttagggaattctagaaatggaaaatctgagtaaaccatcaggaactacagatgcatgtataaacaacagaatgcaagagatggaaaaaagaatcttaggcattaaagatatgatagaggaaatagattcatctatcaaagaaaatgttaaatccaacaaattcttaacaaaaaatattcaggaaatctaggacaccataaaaagattgaacctaagaataatagggataaaagaaggtaaagaagtccagtgcaaaggaacagaaaatatattcagcaaaaattatagaacaaaatttccccaacctaaacaaggacatgcctatgaaagtacaagaaacttacagaacaccaaatagactaaaccaaaaaaagttccctccccacttaataatcaaaatgctaaacatacagaataaagacagaatgttaagagcagcaaaggaaaaaggtcaagtaacatataaaggcagacctatcagaattacacctgacttctcaatggaaacaatgaaagccagaaggtcctgaacagatgatatgcaaacactaagagaccacggatgccaacctagtttactttacccagaaaggctttcaaacaacatagatggagaaaacaagatattccatgacaaaaccaaattcaaacaatacttattctcacatccagttctacagaaaggacaagaagggaaactccgacccaagaaatttagctacctctacaaaaaaaagaaaaagaaaaagaaaaaaacaggcaatagacaattccataccagcaaatcccaaagaagaaacacacacacacacacacacaatacccacaaaaatggcaaagacaaaaataacaggaactagcaatcactagttattactataccttatttcaatggataaaagacacaggctaacaggttggatacaaaaacagaatccatccttctgcggcatacaagaaacacacctcaacttcaaagacagactttacctcagagtaaagagttgggaaaagattttcaatcagatgggcctaacaaacaagtgggtgtagttatgctaatatctaacaaaatagacttcaagctaaaagcaatcaaaaaaggacatttcaaattcatcacacaggaaaaaaactatcagaataaagtctcaattctaaagatctattccccaaacacaaggacacccacattttttctttttattttttatttaattagaaacaagcttcttttacatgtcagtcccagttccctctccctcctttcctcccctgcccccctccaaccccctatcccaacccctttctgctccctagggagggtgaggcattccatgggggatcttcaaagtctgtcatatcattgggagcagggcctagaccctcccccatgtgtctaggctgagagtgtatccctctatgttgagtgggctcccaaagtccatttgtgtactagggataaatactgatccactaccagaggccccgtagtttacccagacctccaaactgacctcctcattcagggggtctggaacagtcttatgctggtatcccagctattagtctggggtccaagagctcccctttgttgaggtcaactgtttccgggggtttctccagcctggtcttgacccctttgctcatcactcctccatctctgcaactggattacagagttcagctcagtatttaactgtggagacccacatttctaaaagaaacattactaacacttaaatcacacattaagtcccacacactaatagtggaagatttcaataccccactttcaccactggacaggtctaccagacaagaaacttaacggagaaataaatgaactaacagatgttatggctcaaatgggcttaacagacatctatagatcattccacacaaacacagaagaacataccttctcagcaccccatagaaccttctctaaaattgaccacatactggataacaaagcaaacttcaacagatacaaaaaaattggaataaccccctgtatcttatcagatcaccatgttttaaagtcagaattcaacaacaatactgaatgtagaaagcccacaaactcatggaaattgaataatgctcaactgaatcaccactggatcaaaaaagaaataagaaagaaattaaagacttcctaaaattcaatgaaaatgattgcacaacatacccaaacttatggaacataataaaagcagtgtgaagagaaaagttcttaacactaaatgcctacataaagaagctggagaatagtcacaccagcaattaacagcaaacctctagaacaaaaagcagcaaacttacccaggagcagtagatgacaagaaataatcaaattgagggctgaaatcaataaaatagaagcaaagaaaaccatgcaaagaatcaatgaaacaaagagttggttcttttaaaaaaaacagcaagataagcaaaccttcatcaaaactaactgaaagggagagaaagaatatccaaaataacaaaatcagaaatgaaaaggggacataacaaaggacattaaggaaatccagagaatcataaggtcatacttaaaaaaaaaaaaagtactccacaaaattggaaactttaaagaaaatggacaattttctggataagtacctcataccaaaattaaatcaagaccagataaacaaattaaatagacctataacacttatggaaatagaaacagttatcaaaagtctcccaaccaaaataaatgcccaaggcttgatggtttcagcacagaattctacctgaatttcaaagaagagctaatactaatactcctcaaattgttccacacaatagaagcagaagggacattgtcaaactctttttataaggccacaatcacccaaaccacacaaagacacctacaactgataaacagcttcagtaatgtggcaggatacaagattaactcaaaaaaagtttggtagccctactaaaaaatttggtagccctactaaatacagacgataaatggcctgagaaagaaatcatagaagcatcatccttcacaatagccacaaacaacataaaatatcttgtggtaatgctaaccaaaaaaagtgaaagacctgtacggtaagaactttgaatctttaaagaaagaaattaaagaaaataccagaaaatggaaagatttcccgtgctcttggataggtagaatcaacagagcaatactcaactttatatagataggcaaagcaaccctgtgcaataaaagaacttccggaggcatcaccattctggacttcaaactctactatagagttatagtaatgaaaacagcttggtattggcacaaaaacagacaggtagtccagtgggatctaattgaaagcccttatattaatccacacacctatgaacacctgattttgacaaagaagctaaacatatacaatggaaaaaagaaagcatgttcaacaaatggtgctggcatgactggatgctgatatgtagatgattgcagatagatccatatctatcaccatgcacaaaacttaagtccaaatggatcaaagacctcaacataaatccagccacaataaacctcctagaagagaaaatgggagctacccttaaatgaattggtacaggagaatacttcctgaacctaacactagtagcacagacattgagatctacaattaataaatgggacctcctgaaaaatgagaagctactgtaaggcaaaggacacagtcaacaagacaaaatggcagcccacagaatgggaaaagatcttcaacaaccccacatctgacagagggttgacttccaaaatatacaaagaactcaagaagctagtcaccaaaacaacaaataatccaattaaaaagtggggtacagaactaagtagagaattctcaatagacaaatataagatggcagaaatacacttaagaaattgttcaacatccttagccatcaggaaaatgcaaatcaaaacaactctgagataccatctttttttttttttttggtttttcaagacagggtttctctttgtagctttggagcctatcctggcactcgctctggagaccaggctggcctctaactcacagagatccgccagcctctgcctcccgagtgctgggattaaaggtgtgtgccaccaccacccagcctgagataccatcttacacctgtcagaatggctgaaatcaaaaacaccagtgacaatctatgcttgagaggatgtggagaaagaggaacactcctccactcctggtgggagtgcaaactcgtacagccactttggaaatctgtatggagattcctcaggaaaattgtaatcagtctaccacaagatccagcaattccactcttagacatatacccaaaagatgcacattcatataacaaagacatctgttcaacgatgttcacagcagcactatttgtaatagccagaacctgaaagcaacctaggtgcccctcaactgaagaatggatagagaaaatgtgttacatttacacaatggagtactactcagaggaaaaaaacaatgaaatcttaaaatccacaggcaaaggatggaactaaaagaaaccaccctgagtgaggtaacccagtcacagaaagacaaacatggtatgtactcgctcatatatggatattttacataaagcaaaggattaccagcttacaaaccacaattgcagagaagctaagaaacaaggaggactctaagagagacatacatagtcctctggagaaggggaaatggacaagaaatcctgagaaaattgggagcataagggatgggggagggaggtaggagaaagaggaggggagaggagaacatgaagaatcaggaagactgagttgggggatgaatagaggtgaacaagaaaagagataccttaatacagggagccaatataggctttaaagagaaatctggcactagggaaatatccaaaaatctacaaggatgaccccaactaagaatctaagcaataggggaggggctaccttgaatgcacttcccctgtaatgagactgatgactaccttaaatgccatcctagagccttcatccagtagctgatggaagcagaagcagagatccacaactaaacactaagccgcactcctggaattcagttgtagagagggaggagtgatgaacaaaggggtcaagaccagactggagaaacccacagaaatatctgacctaagcaagtggaagctcatggaccccagcatagtactgaaccatcatagtactgaaccagggtccctgagcttgggtgacagttaggaggcctgggcagtctatggggcctcttgcagtggaaccagtatttatcctagtgcacaaatggactttgggatcccatgcccccatggagggatactctatcagcctaaatatatggggggggggctagacagactttgatgattcccccatggaaggccttactctccctggtgagtgggaactgaggggattgggaggatgagagaaagagggtactgggattgatatgtaaaataagattgtttctaattttaaaaaatgttttaaaacatgttaaggccaggcgttggtggctcacacctttaatcccagcactcaaaaggcagagtcaggtagacctctgtgagtttgaggccagcctggttcacagagcaagttccaggacagcctctaaagcaatgcaaagaaaccctgtctggaaagaaaaaagtgaataaaattggtgtaagataagaaaatagagaatttgctaatccattatgagcaatctgacccagagttgcatagagatggattctatggaaaactggcaaagtatctaacaaagttaggcctctatatgagctccaggtctctttcaagaaaaaaggcagatttgatagtttcagaaggcctcaaaagatgaatgcattcccaagagtgtggaatctgagcaggtgactagttcctaatgttggtctctcctctgtgacccaggagacaagtgatttatggtttatcctgctttaattggtttcctttgatgtgagttgtgcattcagttctcttcttacatgtgacagagaaaattcacaatcaccctcttgctctactgaaccattgctgaagaagaccgagggaatcaatccttgctaacaataacaatgtgctcaactgaaagaagtgaggaaatgagatgctcccagaacctagaagtggaaacatttattggtcacttcagaatacctggatgcaccacaaagtaggagttggatcacaagaaaggaaatctcttcaaaattttaggtgagtcccttagactctgccacaaggtgtgctgaggggctcagatccaggcacaattttgtagaattacaagtggctttgtcgaatcatccttcagtgctaggtttcactttgtagttgcttttgtgcagctttaacacagcagtcagatccctagaaggttgatctgaatatgtagactgcgtgaatatacaatagcgtatggagactggggaccagatgggaggtctacaaaagcctttcctcgttcagctgatgttgaggtcctcgagaacacagacttggagctgtggattggtgctgagatacttaacctatctgatttctttcatcaaaaaatgttaactttgtaaaaatgctattgttccctaatcgatcgtatctaatatagtttgatgaacattctagaattgaagtcagaaagcatctcctgctttgttccttttttttaagattgctttcacaaggtagggtgggtatagtcagaagtgattcagtaagaacttgaagaggctggaagaaagaaattttaatgtttttcacaatacagaaatgataaatacttgacaagataatttatttaggctgctttaaacatcataaaatgaaaacatgtacagaaacattacatggtcatgtcattagtttttattagttattagttattgcaaataacgtttttttattccatagccagattagagagatgtctcagttgtgaagtgcttgtcctacaagcatgagaccctggattttgatcctcaacaccacataaaaagccaagtgttgtgacatgcatttgtaatccagtattgaggaggtagagataggtggatccttcaagtcctcaggccagccaggccagccaagtttaagaagtccaggttcaggaagacacctctctcaaaaattaagatagagagtaaatgagctagacacccaattttggtctgtgttctctacatgcacatacatacagatgtacatgtgcacacacaagatgcatgaccaacattgagggacatttattttggagacaagatctcactatgttgtacatgttatgttggtcttgaacttgtgaactcaagcaatcctctaccttatcctcccgagtgatgtggctacctgcatgcaacaccagacctggctatgagaaacttctaaactattaaaattcgtggctaggattagcaaaaagaagaagggtagagagaagggaaatggaatggaaagatggatgaatgtagtacttggtgttttacaatcagtcctatctgcattgctcctaatagaccaagtctttcttatttggtttctgacaatggtcagtttaatcatagtttttcagtgtcacctaaggaaatactatgaagggtgtcagtcaaatgtcttaaaggaagcgtagttattagatatactactttttgatgtcatctttcaatttccttctcttttcatttcctgagcaagcaaaaatataggttgagcccagtgaggaaggaaactttctcataaaaagaaatgtgagaaaaagctggggagaaatggccaagataagctttatctgaaacaaaagaagaagtattggcccttttcattaataagaagcaactgaaaacccagcttaggtagaaacagcaatcactagtggatgaggaaaacaatgtggcaatgtaaggatacctctgggattagcagtatcatggcaggtttaacccaggtctctgtgtgctttgccgcagccatgttctgtctcagagctctgtggctgcacactcagcaggtgccactacagacagctgagtgttccaggtcattagttattagagtcattttggacagtaatggactaccttatagtttcatcgtcctcaaaaagtataaattaccttcctttcacggaaagcaggacctgctttcctgcccctttcctgaaagaatatttaagaaaaacatgttatggctgtccatgtgtgtatgtgtgggttttatatgcattatgtggatatgtgcatgtgtgtttgaacatgtgtggaaaggccagagttagatgttaggtatcttaatagctctccactttggttttttgttggtttgttttgcagtttgtttttgacacagggtatctcaccaaatattgtcattaacggctagactggataaccaactacaatatctccatgtctgaactggcccccatcctcccagcactgaggttacagatgtactctgccagcccctggcttccacgtgggcactgggaacctgcatcgagacttgggtcctcatgcttaaatagcatgaactaatggaaccatcttcttggccctagttgtcctgttactggcagcgctttcaatgaccttctcatttccctgttcatttacacaccagtgtttctggaataagttctgttgacaaagacacctaagagtctttcaagttttacctttctgcctgcatctcgcacgtaatagcccacaagactgtatgttttcttcaagcgtgaacaggctctctagattataattatgcctccacagggatgttttatatcttacctggctataggcttttataagaggctttgacttacccagctcaacaagaacattgttttacatgctacggttcttaaataagagcaaagcaggaattgatatattttactgagaaacaatgaggctcaacattctgggatgaggtgggcttttgggagatgaataataaaataatcttccctcacctttccttagcagtcaatgtcaagcaaatctatgtcgagagatggaaaccatacatctgtggccatgtttgtcctcctggggctcttggaccaagcagaactgcagctcatcctttttcctgtcttcctaggaacctacctcatgactctgatttggaacctgagcctcataatcctcatcaggatggactctcacctgcaaacccccatgtactttttttctcagtttcttgtcactcatagatatctgctagtcttcttccataagcccaaggacgctttcagacttcttcaaagctgagaaaacaatctcctttgttgcttgtgccactcaatattttgttttgacctggatgggtatgtctgagtgctgcttgctggctgccctggcctatgacagatatgtggccattggtagccctctgcagtactcagccatcatggccccaagcctttgctggaggatagttgtttgtgtccatgggagtggtttccttagtagttttgttcaaacagttgcttgttttacactctactactgtgggccaaatgtcattcaccatttcttctgtgacatgcctcagatcattcccttgtcttgctctgatcccttcgtcagccagttggttcttttcctggcagctgtttttgttgagtttggctcttttcttgttatcctcttaccctttgtcttcattgcagtttctatcatgaaaatagcctcattcaagggctgtgtcaaggccctcaagacctgtggcttccacctggtcacagtgactctcttctatggcacagtcctctctgtgtacatgaaccacagctctcagcactccacaaaccaggacaaggtgctgtctgtggtctatgccatcctcatccccatgttaaactctctgatctacagtctgaggaatgcagagatcaagggggcccgcaagagaatgatgaagaaagcagcacacttacctcagaaagggtagcatctgggcaggtaccatccctaaggggaaggccaaagtaagactgtggaggacaccttttatattaatagctgcaaagatagatgtgataataacctggcttccctgattcctggtgtgtgttagatgtttccaggtggtctgtctaagacaatgtcattgaaactgaacacagtttaaaaatcctgtttctcagtgccttctggttattacaagacctttgcactcacgagcttagtacctatggttgcctacaatcaacatgttagcatgactggggaaagggccacaagctctcagccttaaggtaaggaactatttgaaagttgatgactattataggatagagcattattttttaaaagggatggtctctcacagttggatggccatatacccgtgcatatatgagtagcaataattggactcagtgggtcattttttaatggagagcatgaaatcgaaaggggaatgtgatgattattatgggaagattttgaaggttgtgggatatagatatgagcaaaacgtactgtatgaatttatggaattcacaaatatttttaacaaaaaagaaaaaagcttctaatgcttgtaactagatcccaggcagatgaaaccttaatattacagtggtttttataataaagtgtgttttaagagctagtacatagggagagatggcaagacagctttttcatttcttcactgattgtggtgattttaatttagcaatctttccattatagtaagcataaagctatgtgatgtatgaaataaatgtatggaaattaaaaatgagttgaaatattttttataattttaggctcaaacaggaacacataatgagaataaataaatggtaaagatagaagaagggaaggggagagagaaagaaaaagggagtgaaggagagaaatcaggaaagaagagaaagaagaaaaagagagaaagggagaagagatgaaggcaagggagggtgcaatggaaagaaggggaaaagaagggagaaaagagaagaaagggaaaaattatatgaggagaggagacatagtgggaacatacaatgttttttaggttgcttcttaaataaataatcctttccctccatattgaagtagctttcttgaagcagtaaggtcacgttcaaggtatccctcagctatgtggtggtttttaggtcagactggcctataggataccccatctaaataaataaatagataaatagataaataaataaataaataaatcatgatcatatttatacatgagatctttaaagggtaggcagagaaaataaaggaagaaaagaacaaatacagatatatcacaaaaaaataaaacaatagtgaggtatgcagaggagagaatgggagatacagattaaagagttgaattcaaagtagaaaataggattgaacaaatcctaaggtctagtatatagcgtggagatatgattataagcagtatatttcattaagtgtttcatttctgatgcataattcccccatccagttaatgggaagaaacaatcaaccctgaaaagcagatgtaggatcatttcccatgtatgtgtgataaacaagacaccagggaacacaatgggacttactcatgacagagccacaacttgtgattcaactatgagagctgatagtagtcaatttgagttgagttctggctctggcccttagagctatgtgactttgggtagataatctcttgaagcctaagtattcttatctaatatgagtctatgagcagtaactaattagcagagtagctccttagtgggaattaacttgaataaaaaattactaagcagtaaattacattacagagatatagtaagtggtacagtggtgacaaaagcagacaaaccagtgggacagaatacagagcccagaattaaagcctaacacatgtactcatctggtgtgcagcaaaagcttcagaaagtcataacaaacaatcatctcttcaatacagggtactggaaaaactatgtttctgcatgcaaaatcaacaaatgtggtcccttatcttacacaaacatccattcaaggtaatcttggtctaagagatttaagcataaggcatgactccaaaagtctccaagaagaaagtatataggaacattcccaactcctagacaataatttcttagaaagttcatctaagttcatgttcaaaaaagcaaaagccaatgaataggattacttgttatcattgaatctgaaggccgcatcctcatttttttgttttttgttttatttgagacagggtcctattatgtagaccaggctggtctggaactcacagaagtcctgcctctgccttctctggtattacaggcctgcaccatcatgtccagctacatccaggtgtttgaatacctgtttcagcttgtggcactgttttgaaaggttatggaacctttgagacagagtcccttgctagcatgtgttggccaataggtggcagtcctttgaaggttatatctggccccttcatgtttcagtccagctgataagtcacttgtgacctgtgccctataacctgtgacctgctcacctgctactatgccttctccaccatgatgtcttgaaaccttcattcaaaataaaatgttacttctgttgggtatttttcatcatagggacaagaaaagcaactaatacacatcacctgaataacacctgcatagaaaaggaaacagaaaaatgaaaggctagctagaggctaggaacaaatatttgcaaaccacatatctgataatggattaatagccaattcctatgaagatcctatgcaactcaacagcaagaaacatgtggtccaattaaaaatgagcaaatgttgtgattagactaaacattcatccaaagataattttacaatgaccaacaggcctacaagaagttcatgagcatccttagcttggatgaaaatgcaaatgaaaacagaccgagttatgtccttgtgtctgttttgaatagctgtgatcaaacaaaacaagagatcacaagtgtgggcaagcaagtggagaaaagcgaatctccttacgccattgggactgagtgttggtgacccattgtggtaatactatggaggcgcctacaaaaaacagcaaaaaaatttcaaatgatgcagctatcctccttgtgtgtgtatgtatagaggaagtggaaccaacacctccaaaagatatctgaccccatgttcactgcagcatcattcaaggagccaagatgtggagacaatagaggtgtttttctatgaataagtagataaagatacacacatgcatacacatacacaaacacaccacaaattcaaacaaaagaggtcactggaaaatattaagcgactggcttaaaatgattagggtttacctctgaacctttagttaaaaccaaccccattcaaacaatggtgattgagaacagaaaagaaatctctccattcacctgtttctcctcggaaaatggttatgagagctaggcaacaattacatgcttttgtaatttaactatcaatgtaataaaaatcaattatatacagtcctaacaatccagtcgtttctatgcttgtagaaaggatctctggtttcattacgatatacacagacatctgttgttatctttaatttaatttctataaaataaaaatagattactactcatgctagtgagaggactcagcaggtaagggtgttttcctacaaagccattgacctgagttcaagcctctggcctccacatgcacacaccaataaacagatgtaaattatattatattatattatattaataactcttcgggcatccctactacaccagaagacctgagaattacacattatattgctaaaaaaaaacttacacaaacttgtaaatatgaaagcttaataatccttagtaaaggaggtccacactgtagacctattgttacctacactgaatattcattagaaattctcagttagaaaatgaaaataagctagtcttggtatctcaaatctgtaatataatattcaggaggctaaggcaggaggacataaattcaaggatatcctgttccacataatgagttctaagtcagcctgagccatgtagtgaaacctcatgtcaaaaaaataaacagatgaacagacaacatactactgactgtatgatactccagaaaagacaaaattatggagacatttaaaatatcagtgctttccagtggccattcattcactagggagaaatggacagagcacagagaaacacttaggactataagatactgtaatgttgactgcctgttatcatatgcttgtcaaagctcacaatgatcagcatcacaagcggagcataaatgaaaactagttatgtgttggatgataatgttcctgtgaggatttatcgattgcaacaaaaacaccactgtaatgcagtgtcagtaaatgaggaaggcttcactcacatgtgtatgggtaggagagaggatgaggactctgtttacttcctgctcaactctgatatgcaactagacttactttaaaaaaactaaagtctggggaatttcgagtaaaggagcttcgcggcaggccggtagctggcaggcttgtcaggtgcgaccatggaggccctggctgaaccgcggtggcctccggggctggcgatgatgaagatgatgaagacaatagatgatttgcttcgctgtgggatttgctttgagtatttcaacattgcagtgataatcccccagtgctctcacaactattgttctctctgtataagaaaatttttgtcctataaaactcagtgcccaacttgttgtgtggcagtaacagaaccagacctgagaaataaccgtcttttagatgaactggtaagaagcatgaattttgcacagactcgcctgttgcagtttgccttagagtcaccacccatatctcctgtgtcttcggcctcaaagaacgttgctgttaaagtacataatgctgaagccattaaacatcctgttaatcaggggaacaggttaatggacaagttcctggttagagaaactggtggttgtgtatcagagttgttgggaaaagaaaatgacaggaaattcagccctcaaaaggagataaatacctctgctgagattaaagagacaagtctcataggaaagactgtacttggtctttcagatgctaatggtcctgtgacaccctctacatccaccgtgaaactggactctaaagtgtcttgtcctgtttgtggggtcaacattccagaaaatcacatcaacaagcatttagatggttgcttgtcacgtgaagagaagaaggagtgccttagaagttctgctcacaaaaggaagccgctgcccaaaactgtatataacttgctctctgatcgtgatttaaagaaaaagatgaaacagcatggcttatctactcacggaaacaaacagcagcttatcaaacggcaccaagaatttgtacacatgtacaatgcccagtgtgatgctttgcatcctgaatcagctgctgaaatcgtccaagaaattgaaaacatggagaagaccaggatgcgccttgaagcgagtaaactcaatgaaaacgtcatgatttttacaaaagaccaaacagagaaggaaatagatggaattcacagtaaatatcgtaaaaagcatcaaaatgaattccagcttctggtggatcaggccaaaaaaagatacaagaaaactggcataatgtctaaagctatagtaataggaaaagatggacctgtggagaagctgtcgtctgcaatcacaggacaagaatataatgtgaacttgtcggaaacagtctcagtaacaaaccactttcctcggtccaaactggactccccaggacagtcggagcctgagagaccggatgattcttctaattgtactgatattcttctctcctcagaatcagattcatgcaatagttccagttcggacatcataagagaccttctggaagaagaggaagcctgggaagcatctcacagaaactatcagaacagagaaataaacccacaacagaatcaccgcactagagccaccgaaagtgctgagattgaaccaagaaacaagcggaataggaactagtatgggcttttgtcagcatttccatatggtgaccagaatatgatgttttttattgccatgtgtggtttcatatttagcaatgcccagggaagatgtttaatgctaaatgtaataatttattttcattcttctttgcctttctagaaaaaaaaaaaaagaaaagttgtgaaatgaaccttaacccttcttggtcagttgcttctttcctttaagatgtttctcccctaaaaccacattgacctgttttgcccaacgcacacattccttagtggggatgtttgcctcggcttgacttctctatttcaggatattttaaagtcgtttttcacttttttccattggggaaccaaccccagcaacagcttctttttgtcctcttgatggtaacaagctggtaagagtatatatgcttttgtcacagttcaccctcttgcctgatgccaggccaccagcagttactggttagtacctaagttaaatgtttttggttgttagacatacctgtgttttacatatagagtaagtttataatataaagtcacaaagttagttttataatttttgaaaagtcaggaaaggaagtactgtaaggtaaggtaacagtcatagtaactctgaaacatatgtatatgcttctgaaatggcatctaacaattatttctgttagtatttttccactggggtcaggcagatctctaacactttgaatcccagctgttaaataaacaaacaaaaaaaatgaaataaatggattttatcaatgaatacacagtttgtaatttccttgaaatagtgtcttgagagtatttgaataaaggctataaatctttaaaaaaaaaaaaaaactaaactctaccttttaaagacaaaagcatgaagcttgacattcatagtcatggactgtggttggctgggcttctgctactgttcctacagggacttgtagttgatctgtgtaggcataaccagttattttttgtcttggggagcctgggctctgcttagaagcagcctgtctcccaggagattccaacctaataagcagtgttctgagagctaatgggatagagtagaatgtgtatgccgaactggggccccagcacctcattgtgtagacacgatcttacccctctgttttagctttccctcttagacatatctcatagtcctgggaccacagaacctggtccaattcagtcttttgatgggatggctctgggaaaggctgtctgaacacaagatggggagaaggactgctagaaacctagttgttttgcgttacattttcagctgaagggtcagttttcagtcctccccaccctgtgcaggttcctactaaattactttctagggttgttcatgagaagtatcaattcacttctctctaatttttcctacccacttatgttaactactattcttgtagctatgacagaacagccaacagaaataatttgctgaaggaaggatttgtttaagggaataagacagcatgatggcagatggctctaatacggggcggtgggagattgcctgagagaagaggagaaacaggctggctacaatgattcactcccctcagggagctccaccttctgaagcctgcaaaccctcttaagacagcgccatctgctgggaaaagagtttaaacacatgaacctttagggacattccatattcaaatcacattttaaacatttatttatttagttgtggggcgaggatacatacaccacagcttccatgtgaatatcacagaattgtttgcaaggatttattctctcttccaccatgtggatcctggagttttgaactaaagtcatctgacttggctgaagctttaactgctaaaccatctccctggcccacatttcagtgattctacttaatatttttttttaatttagtatcatttgtaggtgaactttaggaaagagtaagaaacctatgtggatttaacccaaatgtttaacacaaaattaaaagtatttaccaatttttatagccatttcatatttctggcataaataaatgattaacatactattactcatgttgtgttttcaaaaacttaagataatgtaacttttaaatcatttaacacattcaattgctaatccttaagtagaaaatttgttttaattttcctttttctctcgaaatagaaattgtttgtttacacatgtctaatcacatttatttcaccctaattttccatttaatacttctctcacaaaactaactagcatacattgttatcttagcatttccacagtgaagtgttattctcgggtggcaaatatacataaatgcatgaacatttaaattgtaaaagaatcacattttttctcactccaaaattataattaaaattttaaaaatttaaattgcaatctgtgggaggagaccaaaaacctgaggaattctgtattgaaaggccaggataaagaagacccctcctcagcagataaaataagacctagaatatagggtggctagctggttcagcaactctgttccaggaaaaggctaaccataaaaagttagattagaatcttacaaacgatcttaaggagcagggagtttccccttgtgatttccctcgggacctttcactggcattcttggtattttgagttggggtttcttccctcactggtattcttggtattttgggttgtagtttcttccctcgggaccttccactggtattcttggtattttgggttgtggattcttcctttaaaaacccctattcccagccatttggggtcgaaactcctctacccctgcatgggataagagtctcggccccagcgtgctggttcctgtcaataaatcttgtgtgattgcagcaaggatggtctctcatgagttcttgggggggggtcgcatcatcccgagactcgagtgagggtctcccctcttcgggggaactttcagtatcaaatacagaagaacaaaaaacctaaatacctgttcttacacactttaattgacctgaaaaaacaaggtctaccaatgcacaatttttatgaatttcacttttaaaaacaattttaaaaacaattctttcattaactctctaaaattagcatacaaattgggagcatggggtaggagagagggagctaggagaatgacaaagggagaagaggaggggagaagaggacatgagggagcaggaaggttaagtccggggaagaatggaggagagcaagataagagatatcataagagagtgagccattatagttttaaagagaaatctgtcactagtagaatgtccagaggatgacaccaactaacaatctaagcaatagtggagaggctaccttaaatgcccttcccctataatgagactgagaccttatatgccattctagagtcttcatccattagctgatacaagcagaagcagacacccacagctaaacactgaactgaatttctggaatccagttgcagagagggaggagtgatgagcaaaggggtcaaaattgggctggtgaaactcacagaaacagctgacctgaacaagggggagctcatggaccccatactgatagctgggaaaccagcataggactgatccagaccccctgaacatgggtgtcagtgaggaggccttggcaatctatggggcctctagtagtagatcagtatttatccctagcatacaaatggactttgggagcccattccacatagagggatactctctcagcctaaatacacagggagggcctaggccctgttccaaatgatgtgacagatttgaaaatccccatggaaggcctcaccctccctggggagtagaaggggcatgggaaagggggttagtgggaggcaggggaggaaggaaaggagagagaactgggatttacatataaaacaagtttgtttctaatttaaatgaaaatagaaaaaataataaaattagcatatataataatgggtttcattatggcacttttataaattgaccctttttaaaaaatggatttatgtgttgttgcaatagagtatgttaattattaaatagtcataaaaatcatatttgcctgagatctctaccaaaaaaacttgtttctatatgtttcattcattttagttttttcattgttggtttttaggggtttgggtttttttgtttgtttgtttttgtttgtttaagtaggcctagacattttctaagcataaataacaggacaatttaaacattctgagacaaatcagtaagatatattaaaatgctaatattaattcactcattcaacaaatatagatcaaatgcatttgatgagccaaacactagtccaatgtcagaatgctgaggatcagttatcagtgactggagaaaggtagccaagagagcactgtgaagtcatctccctccaaacagacagcctgataacagcatagaaatgcttactaaagagaggctgcaccccatcctgctgtgcacatcaccaggaactccgaggaaaatcacctttggaaaagagagtacagtcaactaaacaggccatagtagtcagctatccattgctacaatgagatgcctgaggcaattaacttaaaagacataaattattttagccacagttctggatggtgtagtctaagacgggatagtccagttgctttatggctgtgatgagagcactggtgccagtggtggggagcacactggagtaaatttcccacatcctgagccagcataacagggcctcagaccttagcacacctgaccctatgatggaagtgccattcaggctctcaaacttagcacgcaggcagcactgtctggcaaaatgttgaaacaaagacctactccatcaaagcccgtagttctgggaaggtctctaagtgtgctaatcttgctttgggggcttctgtagttcctcttctggcttactattcttgttaactgaagtgtatcagcccagaatatgggttttatgcttaaagctcaccctgagaaatgccacactgggatcccaaacaccagtgtagtcaccagcaggttagtggactttctattggcttgaatccatgactgagcagtcttttctggtggatgccccataacaccaggagggagagagacagagagactgggtccaacgcacttacacgatataggacctgtgaccattgaataggctccaacctgtcaaagattccaccacctcccaattgtctcattctagaaatccagtggttggttggttggttggttggtttgtttgtttgtttggttggttggttggttggttggctttggttttttgagacagggtttctctgtggctttggaggctgtcctggaactagctcttatagaccaggctggtcttgaactcacagagatccacctgcctctgcctccggaatgctgggagtaaaagcatgtgacaccaacaacgctcagcatgaatccagttgttaatacaggtgctttgacaggaatcatatgcactcacagagactgaagcagcaagcacagggcctgcataggtctgcaccaggtcatctgtgtatatgttagcttcgtgtttctgtggaactcctgacagtgtgagtggatatatctctgacttttttgcctgttactgggactcttttcttcctattgggttccgttgtccggcctcaatatgaggggttctgccttgtcttattgaatcttgttttgttctgtttgactgtcatctcttggaggccagctcttttctgaagagaaaacagaagggagttgttctgggggaaggtggggtgataggtatctggaaggagtagaaactatggtcaggatatattgtatgagagaagaatctatcttcaattacacactcatacactacacacacatatagacagatactgatatatatatttttagaaagacatgtgcttcggaagaagcctccaagacagcacatctggaatgactcagcaccatcattccacattgaatgaacactacattgaatacaataaaaatgcaatcatgatccataagtttgaagtgatattaatgaaaacaaatgaattgaatcaaagttagtcgaagtaaaacagatgcgttaaggccatcctgcagagtgactcagaggaagagctcatgcctagcatgtgggtcaagtcagagcatgcttttaaaatgaggacaaaggttagctggctgaagtagaaatctcatgcatgtccttctgttggaaaaccaccaaagacgacatctgtgatacaaaacaattctagagcctcccaagatgtaaatccaccaacaccaaaaaggttaaatgcagaaagaacaccgactttgtcttgtaacaaaagcaggaactagaagggaaataggtggcaggtacacaaagaacatgcccagtggtcagtggcatctgtcacaggatacatgaggtgacaggagagcaggccagtggtgcaaggcttctcagaagctgagtcttcttggttaggctcacaacatacatcccagcagtagcagcccggcccagatggagtctcactgatgcttgcattgcaggctgagggtcaaggtcaggggtcagatgggccctgcaagccccttcctcagctcacagctatcagaaatgaattgagagtcagtgtatggctttcctttttctgcatcatgtggatcaagctttcttcttcaagattgcataagataaaaagcatccagattgctgatttgtaagacagaagttttagtagaacaaacactaccctgccatataccaccaaaccagtctttatgcgtgttgactttcctatgtgtgcaggccctgaagcaaagtctaacatcatagttttatttcagaacttggctgctgttttgcttctagaatgtggcccataaaagtctgtggtctgcctgtcttccagctagacaatgccagccaaccatctggcctggcagctctgaagagagatgcttccacacccagcttgcaaaggctccaagccatgattgtgagtgactgctgtggctattcctgtgcttgtgggaagaggggccatcgagccagccatactacacaggagccttgccagcgttgggaggggaatggaagaggtgaagctctggtataaacagtcgatttatgtctgcaaaggtgagacaccgggagctcaggaaggttgtgcatagatcatgcacaagggtgtagagaacattagttgtgcaagcaggatggctccccctgctcagttttacatcaggggatccaatcagctatatgaacacaggttagtaaagtacaaatgtgtgggtgattacataagaggtgagcagtgcacttgtccaattttcaataattaaaaattgtgtgtgtgtgtgtgtgtgtgtgtgtgtgtgtgtgtgtgtgtgtgtgtgttgagggaaagggtgcatgtgaagggcagaagacaatgttgagtagtcaattctctactccactacataggactcaagtaatcagattttgcagtaagtccctttgggggctgagctatgtcattggcccatttgttcagttttaagactaaaaatagaaaatgatttatcttggagtggggattaaacatctcataaaaacccgtgttgtgcaacatgcccttgcaggtgtgtccagccttttcgcatggcagcttgacatggtcatctacatcacactggagaacaaagcacttaagttacaaaagctggtagcaaagagatctcatagtattttgagtaagtatatgattttgtgttggaccacgtccataactgttcttagcctcttgtgtcccataaagcatggatcgactacactcgatcagtttgcataatataatcatatattgctacaaagaattgggggtaattggtaaatcataagaccagcaaccaggtgtctaccaaactttacatatcaaaccatgaaattggcttaaaatagatatataaaatgcatatcagagacactgtagaaagaagtttctttgaccaaacatagggggaactgcccattcaccaatctataaacaatacgttggtaacaagaaggatgggtatttggggacagacaaaaagaattacttgtagagagaaacaggcaagtgtcatgtcctaggacctcaacttccttagccctctatctggacccacgagggtctgatgggaattgtctacttagctttgattcctttctctccaaatagcctcatctataatttgtctgcctgcatgtatccctcaacagatggagagttgtagccctggtccaagtacaaagttctgcagttttgttctttgctggaagctaaaataggcatggaggctcagacaaacatctattctgaacttgattagcgccagcccatctgggaaagatttggagaggttgaaaaactgagagacacaccctgaattgcagtggcttttctgaaatgaattctatattccacttacaggccctctttagagaagagagctgtgacttgtcctgtttcaaacagttctcaaatgctgctttttggcatccaaaacattctactatgaatctgtttattcgcccactaataagcacactagtctggaaagtgggacctaacatatgctttgctccttttgcttctctccagttttacatgaatatttattaataagcctccttgataaccaagcacaaaagtactttctctattctcaatgcataaagatttcactgctgataaatatacactgaaccaaacaacagagatttttggtaaagattttaaatttaaaatctttgttctccagaaaaagagctactgatgattgatgtagcagcaggagctgctccctgcaaccccaaaccatgagggtttttgttgttgttgttgttgttgttgttgttgttgttgttgtttaaactgatataataatcaatttgtggctgtgttatttcagtggtgtctgacattacaagaatttcaggttaatttccatcttaaaaattggcaaatcaaaggataggagctcggcaaactagagcaaaagtaaaccaatatgggggggaagggtagctcgaagaaaatggagatgggaccctggtgtggtgactcagacctttaatcccagaactcgggagacagaggcaggcggatctctttttcaagccaacctgtttactcagctaattccaggccagccagagctacatggtgagaccctgtctcgggaaaaacaactatataaaaaaagaaaaagtaagtggggctatccaggtatctgaggggttggcacaaggaagcatccctgtataaaatcacctccgtcaaccaggtccctttcccattctctgtggacttctgacgtgcaaagacatcaagcagattcctacctcactttttattgtgaatcattttcactgtgatgaaaacaattcattttctcttaatttctgggtgctactcccagtattgtccctgcctgcatggttctctgtgggtgccaaccaactcctctggggctcagcaaagagaacccccatccaagatccctgggtctccaaaagcctcctattttgaaatacagcttttctttttttgctcattctttctttcgaaacgttttcttttggagtaaaacttacagaagaaaagtgttaactctgtcttaatggaaatcgagttagcagcctcagcctgaaaagcaaagcaaaaaatgagaagatgacctcccatccatgtgcatatggttggactccctgagtttagacaaataaataaataaatttaaaaggacaacatgaagttgggaaggggatgtggctgggagtcctggagggactaaaaggaatatatgatgaaggtatattgcagacatgtataagattttcaaagtataaaaaactggggaaaaaagacaactaaactatacaaaagctagatgaataaacatatgtatgaaaatgtaccttctatgtgcaggaatataattactgagattcctgttccacaaggttaataggcttaattgggtaagaaaactgagcagctaaaatcactgtgatcaaaatgtgagcatgaaaggcaaagaagctcttggtcacaagaaacatttatattagaattggaagtaaaccagcctcatgcaagagattgtgaagtagagagtgaagacaactcaataggtagcgatgttgatattgaataaagatctgattagtgccaggtggtggcagcacaagcctttaatcccagcacttgggaggcagaggcaggcagatctcagtgagttcgaggccaacctagtctacaaagcttggcagagaaatcttgtcttaaaaaccaagaaacaaaaaatatattatatgtatacatatatataacaatatacatatataacaaataatgtagaaaatgccacatagaattagaaatcaaagtagaagacaataatataaaattgaacttaaatttatctcactagcatactgtacacattagatcgaattctctggtatattctcctaaaattttatttgactttatgttttatagcacattagcattggtgttttaatgagtatatttgcaacaaagcccagagagaaatacagaggtacttagaagtaaaacatcctgattctcataatgaactgaaaacattgtgtcagcttgtatttcttccatagaaaccagcaaaaacttcaactcaacataggtccaaagtcttgcatcaggcctctctaacaaatctaagataaaggttcattttaaaagtttagcaaatatatatatggtagcatggttaaaaatctcaggacctgaattcgatttcctattttactatggacaatattggactctattgaccattcgtggtttcagatttttgtgatgaaactaaacagctaaagtgaacctgcctgacaacccaattagcatgattaaatctaagataattttatcaacaagctatctacacagaaacttgcagggttaggcccctgtgggatgttgctgccacctattggaagtgtggccaaactgcacacagccttcagagtatgttgaaagtgtagagagagcactggcctagtgtgcacagatcctgactacacacccaccaaaggaaatagtaataattttctaagatatctcacccactttgggggcctgccataagaccccagcacctagcagtgactgatcaccctcaaacatgttacatgccctgtgctctacacactgcacaagggtctctccatgacagaattactaaacaaactgtgctctattcatacaacagaaatttacacaacaatcaaaatgagtgaacatgcagtagcaacatggacaaatgacaaatgcttggtgctgagagaaaagaactaggctcaagttgtgtttcctgcaacctaatgggttgactttgttcattctgtctttggaagctaaacattgacactggccttcgtatcaagttcagggcatcctctcagtgacagcatctaccactgtcattcttacactgcttttaaaaactaattcttccccccttagctatccttgttgaattcagggacttctccctttgcgtctaagatatttcatgcagatctctcacaacaaactcaagttagcactcatgtttccacgaaacactggattctttgttctaaactgtgccaggagagaccagtctgctgtagaatattcctttacactatgtgaatatatgtcactgtgattggtttaataaacaagctggggggggcaggggaggaggggagggagaggggagtaaaattgacatgtaaaacaatcttgtttctcattcaaataaaaaaattcaaaaaaaaaagtagtcactctcagagacacgatgcttgagtggtttggtctctgctctaaaagatgttggtgcttaccctttggaaagaagttcatatccacaaaaatgatccttgagattgtatagtcttaccctaaggtaaataataataataataataataataataataataataataataataaacaagctggctggccagtaggtgaacaggatacagttaagggggaaagccaaactgagaatgatgggatgaagaagagcagagtcagggagtcaccaggcagatgcagagggagcaggagatgaatgtaataaagttaccaccatgtgtcagagagtaaataaagaatgtgggccaacttaaaatgtgagaattagttagtaataagcctgaccatggttatttgggactgggaggtcgggacaagaaacttccacttacatcagtcaccttggtaaaccgtgttacatttactcccagatgagcacactgagatttcaaaatccgtaatgtgttatgcaatctaattccatagaaaatcctgcctgataacagtttggttttttgttttgttttgttttttgcttgtttttttttttttcgaaacagggtttctgcttgataacagttttaaagtatgttgtccatatggtctccagcatactgccaaaacaatctagaaatatcattcaggcttaagagaaataatttatctcccccaaacccatgtgttgctctctcctgctggaccatactgatatgagatggcaggagtggaggctgacttgctggatcttgagaggataggtatcattttgcaaagcaataaattgatatgaacttaaatatttaccaagcatgtgtcttcttcagacaggcactatttccatggccacataaaaccataatcattggaggatttcaagttaccaaattcatttgagtctaaccaaatgcctccattctaagtatcaaggtcttcccccccaccccagcccacccccgcacacatcaagggtgatgggtcagctgataaagtacttgccatacaaacatgaggacctgacttctattcccagtacccacatttaaaaagtcagatatgctccttctctgctcttctcttttcccacctatgcgctctctttgcctctctatggtgaccggccatggcggtcagccattacccctgttcctcttctctcttagtctccctactctgccaggccatataataaactggttaacatgtctcaaaaaaaaaaaagtcagatatgagtcttccctggccatccgccatggtggatggatgaaaggcccgagctaacaaggggttagcttgttaaacaactgcaataaagcctcttgctgtttgcatcaagtttccgcctccacctggtgattggggtggccacggtcctggaccaagatcctgggagcctgagcctcccggggtctttcatttgggggctcatcctggatttgcgaccacccctcacctgagtggagttgatcttggaggtaagcgggtaccctgtattgtcttgtctactgtctgccggctctgtctattctgtattctgtaaaagcgcttttggttgtttgcagtcactcgggtcttgggaggagacagagagtgtgagcagcagacgacgtgctaggagatcaccgactgccaccctgggagtcgttccaggaagtctgggggaacctcagggatgcttgggagattcccgtctgggagccggtgagggtacagtagttctcctagactggggaagttatacgccctcccggccgtctgtatttctggaatggttttgtctgtctaggtggagacagacatctgttagtttttgtctgtgtgtcttgggtttctgttttgtcttatttgtgactttgatgatgggacctaccataaccacccacctcagtctgacttttgaccactggacagacgttaaggaccagagtcagtcagttaaagttatgacaccccctttcgttgagtcacatggcaccacactaggtaactttcttatgtctgtctttgtttctgtatggtttctgtgaagtctggaggatcggaacaggctgtgtgactggctagttaagcaggtttgttatctgatctgttgcaatccacagtctgtctgcctgcttttcggtgctggcttggcagatcttgagctgtatgattctgtgtcagttttgtgtttttatgtctgctgtttttgttaattgtgtaagcgtctctctctgtccttactgcccatgcatgtggcatgtgtgggccaggggtcttttcttgctatcctgaacatgtggcgtgcgggacaggagttcctctgccatgtgccatgggttagagtgtgctgcggcggagtctcctgtctccgagcacatgttgaggctgctgttctgaactccacccactgatgcagccctcgcagctgagcctggccggtgcaggtgagtttatctctccatcctcacttggctgtctgtgaggcatgcaaagtggggctctctctgccccaactgccatcctgccatgggtcctggcatgccgtgggaatttctctgccctgagcacatggtgcagggtgggtgaaccaaaacagaacggccttaaagttattaaaaactgtaagaaggactttggtaagagtttttatgttgactgaaaaatgagagaaaatgtaggagactaaagtaataaagagggaaagaaaaagagaaatttgtctaagaatgtctaagggaatcagaggaacgaactaaaggtatatagaaaattacagaggatcaaagcaagtcatagaaggtcagaagaaaggtgtcaaaggtcagaggaacggttgttaaaagtcagagaaaaatgtaaactgttacggtttctcatgcctacaaataataaattttaaaaattggtaacataagctaaaattttaaccatattaagttaattctgttttaaaaattctgtttatttctcaagtaaattatgtttgcttgttttgaaatcttctatttcctggcataacctaagttctgttacaagcatacagctaaaacaaatggtacaggtcaccaccattttgtagtcagccacatggcaagctggtcacatggctggctggtagccattttgctgaagttgaaaaaagaaacttggactgccatcttgactaaaggtgaccacatggaaattaggaggtaccatctttttttgctggtttgtttgcttttttatttgaattacaaacaagattgaattacatgacaatcccacttcccttctccctcctttcctcccctactaacccccccaactaaaaccctaccaatcacataggatgtaccatcttataaacaagttttttcaattaaaatttaaattgttaatgcttctacatatttcagaaagacattaagggattttaaatttctttttaaaaccagatttttaatgtttatgttttttaaaatgtttttattattgtttgtacttaaagagattcaatttggaattatttttaaacaaagcctgacaatgtaaagttcttgttttataaaacctgctaatgaaaggttcaggctttaatgctgatcggctctacctctttaagagacagaccccgccccctgacaacagtcagggcatgcacagggacatgccagcaccacatcacccaccatgcatttacagcctgcatgaggactctgggcatgaatggaacctcagtgcaaatgcgcagtcttccctttacaagttccaacttccctgcttcactctctctctgctttttcgctctctctctcttcttctcctctctctgtttgcttctgcttctcttctctctctctctctctctctggtgaccagccatggcggtcaaccattaactgtttctcttctctcttagtctccctgctctgctgggctttataataaactgcttaatatgtcaaatatgtctcatcctgtgtctcatcttgtgccttccttcttttcttctttatttctaatttaaacaaaaacataacagctaacctattataagatgttaaaaatacaaattaatacagtttatgttttcagaagttaagtttaagcaagcagctaaaatgtgtacatgtagctactgtggatataaggtaactctatgcagttttaaattcaactgtgctaagtttcaaacattttactaagttaaaactagttatagacagactgaaaattaatgaattacagaaataaggctttacctagccacctatgtgcttcaggcaagtaactaggacagacagacctctaatgcttcagagacctgcagaatatggcatttaaagcgttattttaaaagtttataaaatcagacagactgctagatcctgacagtgacccaaagtctccaaagaagattatggggcaccccagttccttcacgtggatgatgacgatgctgactagtgagagagatgctcagatgtgatacctgctgtctgccaggacctgtacaagactgtggacaaagctgctggacactggaaaattgattgcacctcctttgcctagacaaaacaaggtcagtcttttccatgtccctcttccacagagagaaaaaacctctcaccttagaggcctggcgaagattgctgttctttgatacttctgcctccaatgctaatggagagagttaggtatggctaactgtatatggactggcttctgtcactttttaatagattcagaaactgtataaaatttaccgttctcagatctctgaaatattaatggttgtcagcttgacaacatcaggcagtcagatccactgtagattatagttagcatgttagctgataaagtagtgactacctactgttcagtcacaagctcaaggtttttaggtttattctggttgtcatctaagtataaacttaaagggcttttcatcaggccaaaggcacctctgcccaatccatacctggctctctggacagaagaaaaatgtacatgcttctagaccaaatctgtagtttttgctaggactcaaagttataaatatgttcctgctgtttgaacagatatccagatatctgctttttctgcactgggggcttcagtaaataagtttcaacttacgttcctagtttaatcatgtcttaaacaggtttctgcttctggcagacacatctgaatagcagttgctgactataggctgttcctaagtagattgagagccctggacttgctatggattcacatccagtccagctaatgcagataccccctgtctctgcaacagagtctgccaaccagaagctcctaatggataccccattgtctaaattcccttttttgcttttgactagcatttccaccttcttgggtccttaacttcaccccgaagtcagcaggaagtagcatgggaaagaatatgtcgcccattttccctcgttgaaatgctaagtcaaaaggaactcccttacagaggggatgccaatacctctcactccctgatagggatgctggagagacagcaattccacaattggaatctccaaaaagaaaatgggggaatgaagggaccaactccccatttcggcagccacaacagtctaaaacgtgcttgcctgaccttgccttggtcactagaaggtcagatgcctgcctcgtggcaaggaaccaatcagaagttagctggtagtgctatgctttacggctctgggtgtgctttacagacaagtgcacagcaatgacatgcagagcatagcaaccaccctgggagggcctatgggccagttgatcaatcaactcagggcaagcactccaagcctggaggcacaccaatcctgagcctgtgtgtacccctagacactgcccttacactgccctataagacatctatgcagtggcttctcaccgtctttcctagccatctgccatagtggatggatgaaaggcccgagctaacatggggttagcttgttaaacaactgcaataaagcctcttgcttgttttgtcacaaataaataaataaataaataaataaataaatagtcagatatggcagagcttgggagagtcaaatttatgctaggtactagccagccagtgcagtttaattagggagttctacattctgtgctagacctcatctcaaaaaataaggtaaagagcgagtgagaaagacaccagatatcaacctatggcctacacaaacagagagagatagagagacagagagacagagagatggagagacatattgtaaatttcatttaagaagctccatgatatacacaattaatttttttctatttttaagtcttactaatgtacaagaaataaaataaattttagtggctccatagagacagatgtatgattgggaagtgactgagagtttaaaaatctcaagtttatgattttatttctattagtgcccccactagaaatatcaagctcatctaatagtcacagtaaccacaatatgataataatcaagtgcaacagttgcttggtgccctaagacttttcataaataggacctctgttacaagcaactttgtctaatgatgtaatcactaaacaacaaaaattcttgcatgtctccagtgacttataatgaaaactatgtagtcttcagtcacgtgtgaacaaactaaattcaacagcatattcagtaattattcactgtgatcaaatacaattcatctctggaatattgtattatcaacatagagaaataaatctgatataccacaataatagaatgaagaataaaataataggaccatattaatagatacagaaattttaactggtacaattaatcgttttatgatttaaaaaaaactaggtgtaaaagaagtgtacctcagataataaggttatgtaacacaagcccacagctaccatcatatttaatgttaaaaatatttaattttttcattaaaataaggagtgacacaatgaagctgactcttctttgtaggtcacttaatactggtaattctatctaaagcaattaaggggtgaaaaagtagttaaaacattcaaaagaagaaagtagaactcaaacatctacacgtgccatggttgtgtgtttagaaaactccaaacaccccaccagaacagccattataattaagaaacacagtcaaaatttcacaagatgcagtatcatgcaaaaagaaaaatcagaggtatctatggaaacctcctggtgagatttagtctggttctgttttgtgggatccctatctgggatgtggagggggttcaatggaaccccaatattctcctgtccagggtaaaaaaagtgagaagttgcaccattaacctgagattcttgatctcattttatgttctgttggtcttgtctttgtacatcttaacttgtctctggcttcatttttattgtcctttctgttgtttgtactttctgtgttaacaggtttattttggacatggggtaactgaactgagggacagtataggtaataagacttgcaacctaacaaccctctaacctgtgttctaaggaattttggcaaattttattcccctataattaaggaggattatgactatcccatcaccaagagttgcctctgaacattctgaagctgaaaggcccacagttggggttgactggtctcccaggatacttttgattctcacataacctgggcagttgttaatgtcacatgcagtaaccccggcacccagatcagattagatacatcttgccttgggatgaagcaacttccaacctactcccctgggaggaggtctatttgctctacaacaagccaagccctggtagtcagcagatggaccttttgagggattgtagcagagaccaatgagccccttctgaagaccattctgcaggactcacaggactaagaaccccttccccttccttataaccatatttacactttctctcctcctcacctcaacctctacctttgccaccccaggccccatgaccaagacctcactctgccccaacatctgcacctccccctccaactagttcttccttaactccacctatcttctccccccacccttggctcttccctaccttcccctgtcttttaccctcctcacacccagcagggagtcccatatggcccccctgacttctccaattctagttgtgggatggtatctccttcagtccccactccactcctaacaactccattcctgacaattgttacctgtatgtctctttctccatcacagatctctacaactggaagacccagaacctccttttagcgctagccccaattccttaatttctctaattgattctttctttttcaatcatttccccacatgggacaactgtcagcagattctctgtactctcttcactactgaagaaagggaatggattctcatggaagaaactaaagaaagacaggccaatgaaaatacaagaagcctacagaacaccaaacagactgaaccaaaaaaaggtcctcttgccacataataatcaaaacaccaaaaatacagaatgaagagaaactattaagatgagcaaaggaaaacggcgaagtaacatataatggcaaacctatcagaattacacctgacttttccatggaaactctgaaagccagaaggtcctagatagatactctacctacactaaaagaccatggacaccagcccaaaactatacccaacaaagctttcaatcaatataaatagagaaaacaagatattccatgacaaaaccagattcaaaaaatacatatccaccaatccagccctacagaaagttctggaaggaaaactgcaacacaagaaagtaaactactaccagaaaaacataggcaatagataatcccactttacaaacagccaaaagaaaaaagggatggaataccacacataatttcaccaccaccaccaaatccaaaacaaaaaagaatgaacaatcaatggtcattaatatacttcaatattagtggtcttaactcgcctataaaaagacacagattagcagaatggataagaaaacagaatccatccttctgctgcatacaaggagcacacctcaacttcaaagacagatagtacctaaaaattaaaggttgggaaaagattttccaatcaaatggatcaaagaaacaagcaggggtagcagcaatcctaatatccaacaaattcactttaaactaaaatcaatcaaaagagatgaaggaagttacttcctactcatcacaggagaaatccatcaggataaagtctcaattctgaagatttatgccccaaatacaaaggcatccacgtttgtaaaagaaacattagtaaaactcaaatcatggccaggcattggtggtgcatgcctttaatcccagcactcaggaggcagaggcaggcagatatctatgagatcgaggccagccttgtctacagagcaagtgccaggataggctccaaaggtacacagagaaaccctgtctccaaaaacaaaaacaaaaaaaattcctcaaggcacacataaaaccgcacacacttatagtgggagacttcaacaccccactctcaccattggacaggaacaccaatcagaaacttaacaaataaacaaaggaactaatagaagatatggcagaattgggctaaacagatatctacagaacattccatccaaatgcaaaacaattcaccttcttctcagcgccacatgaaaccttctctaaaattgaacacacactaggcaacatagaaaacctcaacaggtacaaaacaattgaaataaccccctgtatcttatcagattaccatgctttaaagttaaaattcaacaacaacatgagctgcagaaaacatacaaactaatggaaattaagtaacacccaattgcacaattcctgggtcgaggaagaaataataaaagaaattaaagatttcctagaattcaatgagaatgaggacacaacatacccacacttatgggacactttgaaagaagtgctaacaggtaagttcatagtgctaaatgcccacatgaaaaaacaggagaatattcacactagagaattaacagcacaactgaaagctttagaacacaaagaagccaatacacccctgaggagcagacgccaggaaataatcaaactgggggctgaaattaataaagtggaaactaggagaacattacaaagaatcaatataacaaagagttggttcttcaagaaaatcaacaagatagacaaacctttttccaaactaaccaaacagcagagagtgaacatacaaattaataaaatcaggaatgaaaaggggacataacaacagacacagaggaaatccagagaatcatcaggtcatactttgaaaacccatgttcctcaaaattcaaaaatctcaaggaaatggacaattttctagacagacttcacttaccaaaattaaatcaagaacagataagcaacttacatagacctataacccctaatgaaattgaagcagtcatcagaagtctcccaaccaaaaaaagcccagggccagatggcttcagtgcagaatactaccaaatattcaaggaacagctaataccaattctcctcaaagtattccacacaatagaagcagaatggtcattaccaaactctttttatgcggtttcaataacattgatacccaagccacacaaagacacaactaagaaagagaactacagaccaatatccctcatgaatattgatgtaaaaatactcaataaaatactggcaaatcgaatcccagaacacatcagagaaatcctacaccatgatcaagtagacttcatcccaggaatgcaaggatggtacaacatacaaaaatccatcaatgtgatccaccatataaacagactgacgaaaaacaaacacatgatcatctcactagatactgaaaaagcctttgacaaaatcaaacaccccttcatgataaaggttttggagaaatcagggataacaggaacgtacctaaacataataaaagcaatatacagcaagccaacagccaacatcaaaataaatggagagaaactcaatgcaattcctctaaaatcagggacaagacaaggctgtccactctctccatatctcttcaatattgtacttaaagttctagctagagaaataagacaacaaaaggagatcaaggggatacaaattggaaaggaagaagtcaaactttcactatttgcaggtgatatgatagtctacatatgtgacacaaaaaaactctaccaatgaactcctacagctgataaacactttcagcaaagtgactggatacaagattaactcaaaaaaaatctgtagctctacaatatacagatgacacattggtggagaaagaaatcagagaaacatcaccttttacaattgccacaaacaacataaaataccttggagtaacactaaccaaaaaagtgaaagacctgtactgtaagaattttgagtctctaaagaaagaaattaaagaagataccagaaaatggaaagatctcccatgctcttggataggcaggatcaacatagtaaaaatggcaatcttgccaaaagcaatctacagattcaatgcaatccccatcaaaatcccaacacatttcttcactgaccttgaaagaacaattctcaactttatatggagaaacaaaagacccaggatagccaaaacaacactgtacaacagaggaacttctggaggcatcaccatccctaactttaagctctattacaaagctatagtcctgaaaacagcttggtattggcacaaaaatagacaggtagaccaatggaatagagttgaaaaccctgaaattaacccacacacctatgaacacctgatttttgacaaaaaaaatccaaatatattcgctggaacaaagagaacatcttcaacaaatggtgctggcataactggatgcaaacatgtagaagactacagatagacccaagcctttggccctgcacaaaacttcagtcaaaatggatcaaagacctcaacataaaaccagccacacttaacctactagaagataaagtgggaaatgtccttgaattaattggtacaggagaccgcttcctgaacataacaccagtagcacagacactgagatgaacaattaataaatgggacctcctgaaactgagaagcttctgtaaggcaaaggacatagtcagcaagacaaaacgacagcccacaaaatgggaaaagatattcaccaaccccacatctgacagagggctgatctccaaaacatacaaagaactcaagaagctattcacgaaaacaccaaacaatccaattaaaaaatggggtacagaactaaatagacaattctcaatagaggaatctaaaatggctgaaagacacataagaaagtgttcaacgtccttagccatcagggaaatgcaactcaaaacaactctgagataccatcttactcctgttagaatggctaacatcaaaaacaccaatgacagtttatgctggagaggatgtagagaaaggggaacacccctccactgctggtgggagtaccaactggtacagccactttggaaatcaatatgtcggctccccaagaaaatgggaatcagtctaccacaagatccagcaattccactcctaggcatatacccaaaagaagcacattcatacaacaaagacatctgttcaacgatgttcatagcagcattatttgtaatagccagaaactggaagcagcctagatgcccctcaactgaagaatggatagagaaaatgtggtacatttacacaatggagtactactcagcagaaaaaaacaatggaatcttgaaatttgcaggaaaatggatggaactcgaagaaaccattctgagcgaggtaacccaatcacaaaaagacaaacatgatatgtactcactcatatgtggattttagacatagagtaagggattaccagcctacaatccacactgccagagaaactagtaaacaaggaggaccctaaaagagacaaactttgtcccctggagaaggggaaagggtcaccatcccctgagcaaattgagaacatgggaagagggggagggagctacgagaatgagaagggaagaaaaggaaggatgcagaggtcatgagggagcagaaaggttgagtcaggtgtagattagaagaaaggatatgtgataggtagggttttagttggggggtggtaggggaggaagggagggagaagggaactgggattgtcatgtaattcaatcttgtttgtaattcaaattttaaaaagtcaaaaaaaaaacaccaatgacagtttatgctggagaggatgtggagaaaggggaacactcctccactgctggtgggagtgccaacttgtacagccactttggaaatcagtatggtgactcctcaagaaaatgggaatcagtctaccacaagatccagcaattccactcttaggcatatacccaaaagaagcacattcatacaacaaggacatctgttcaacgatgttcatagcagcactatttgtaatagccagaaactggaagcagcctagatgcccctcaactgaagaatggatagagaaaatgtggtacatttacacaatggagtactactcagaggaataaaaaaaaaaaaacaatggaatcttgaaatttgcagaaaaatggatggaactagaagaaatcattctgggtgaggtaacccagtcacagaaagacaaacatggtatgtactcactcataggtggattttagacatagagtaaaggattaccagcctacaatccacactgccagagaagctaataaacaaggaggatcctaacagtgacatacatgctcccctggagaaggggaaagggacaagatctcctgagcaaattgagagcaagggaacaggggaggagggagctaagagattgagaaggggagaagagaggagtgagggggacatgagggagcagaaagtttgagtcaggggaagaatagaagaaaacaagaaaggaggagataccataatagagggagacattttaggtttacagagaaatcaggcactaggtaaatgtctggagatctacaaagatgacaccagctaacaatctaagcaacagaggagaggctaccttaaatgccctcccctgataatgagattgatgactgacttatatgccatcctatagccctcatccagcagctgatggaagtagaagcagacacccacaactaatcactgaactgaaatgaaatccagttgcagagaaagacaaatgaagagcaaagggtacataccaggctggtgaaacccacagaaacagctgacctgatcaagggggagctcttggtccccagactgatagctgggataccatcatgggactatccagaccccaggaacatggatttcagtaagaaaccttggaaatctacgggacctcctgtagtagttcagtgcttatccctagcataggtgtgaaaactttgggagcccattccatatagaggaatactccctgagtcaagacacacaggggtgggcctaggccctatcccaaaggatatgagagactctgatgacacccgatggaaggcctcaccatccagggggagcagaaaggatatgtgaagataaggttttagttggggggggtggtaggggaggaggagagggagatggaactgagattgacatgtaaaagaatcttgtttctaattcaaataaaaaaatctgcaaaaaaaagaattttgtgcatcctgagatatagagcctgggtccaggctgcagatacaggtgatgaagatgcctgtggcctctgaagcaaccaaacatgagatcactcgctgaaggcaatgaggaaataagggcctgagacaaaggtatgagaaacatcctgtgcacgagtgtgtgtgtgtgtgtgaaggttcacatgtacctgtatacatgtatgcgtggaagtcagagattgacactgctacttccttgatcacttcccactttttttttttttttttttggagataaggtatctcagtgaatccagagctttcagcaagttctagagttcctgtctctacctaccaagtactggtattacaagtacccactaacatgcctggctttcacataactgttgggaaccaaaatcaggtcctcacacttatcctttatggacagactaagccatttcgccaactccaaaaaccttgcttgtttacagtactaggaatttaatccggtgctctcacactctaggcaggcactttaccacagagctatgtcctcgactaaaacacaaaagaaaaggaaacctgaaaaaggaaaagtaacttgcaaagaaaagaacagagagatggaaggaggaaaagtggaaagagaattgtaccacaaaggcatcaaaaagggctgttacaaatagcatgccagtttttagcacagggatactaagcactaggtctctggatagtgctggctgaatgtaatggcaagaaggtgagttgtcaccttaaaaagtcaggtataaatagagacagaatcaagtgaatgtacaaagtcaacccgctgccttacactccttccaaattactcttgtgcccacctttcctgctccatcctacttcacacccaccacctcttgtcaggttttaagcagtcactcctatagctattttcctacgtgatctcctttctaagatggctcttcccccaaacaatatatagtttatcttatgacaacttgcagagtgacactgctgatgtacagcacagagtgatctgctcagaaaaaaaattattatctgcttccttcagaatataatccaaacccctattcattacattcaatgccttccactttttggtctcaataagcaagcctggctgtattagctacaatttaaacatctgaatttacatgaaacaatggcctttaaaaaattaaatacttgttgtaagctaccccaataaagtctcactcacatgactgcctaaacatgagctggacagagacaacaccaataaacatgtcaaagtggacaaaggaaagaccaagaagcctgaaccctacacaaagaactatgggcaactaagcaaagctgagagcaggagaaatagttttccccaaggaagccacagcaattggttatctaataccaaatgaccatccctgaaaacacatacaggcaagtaacattgtatttgttatatttagtcgtgtgtgtgtgtgtgtgtgtgtgtgtgtgtgtgtgtgtgtgtgtgtgtacatatatgtatgtaataacaagtaatttaaaaagaagccatgaatttgaaagatatcaaggaggggtatatatgggaggatttgcagagaggagaggaaggcagaaaatacacaattaaatgcatttgaagagtcaagatttgaatcatgagcatttgaataagaatcaatgttccctttaaaatttgtattgcatttgttgacttagtggtcaagccttccaaccaacacctgatttcctgatgctccatcctttccatgctcgaaccttttcaccttcagtatttcctccttttcattttgcctgtattttactgtacttccctctcttaagacatcatcccccgggggtcacttcgacttttctggctttcacatgaactccaggttaatacaaaacaacagattgtaagctatcagacagaacacacagcaattgtgttttgggcctggatgaccggcataattttttctagttacctctagttacctgaaattttcatgattttgttcacagttaagtaatactccattgagtaaatgtatcatattttctttatccattcatcgattgatggcatcatgattggttcaatgtcctagctattgagagttgagccacaatgaaaatggatatgcaaacattccaacaggataaacttttaagcaaaataccaaaaggccttcagagttattcttaactattatccagagattctgattcaattgaatgatcaaaagataaataaggtcaattgtttcctagttgcaatgttttcatcagcttactaaccattttgaatgtttccacctctgaactttggggagatttatgggaaactcatgaattaacatgcaaaaagcatgatgtactgtaaatggagttcttaactggtctagataataagatatcaccacaaagtacagggctcagcacataggtaggagctcagtaagcatccatcagtccagctccacatgtccatatcagagtggaaaggggtgagtgaatgtgttcaagttgtctagccagtcttgctttcttccaccaggtgtttatgttgctattgtgttctgttgcaacccataactacttcatcatgtaccagaagatatggtgattgcccttcaggggttagaggacttggccatagatactgcatttaataagcattgtctttggagcatttgtgagttttactgtacataataaccccagagagcaattaaccacaaagccttcacatttgagaaatgtattcctctctctttcataaagatcctctagggcaaatgtaactaaacctctccaaggagagaagaaacaagccctttccatgtgcaccccaataccagtttccaaaactgaccccaaatgtatatattagctgattccggtggagcctcttaaagatcgcaagctctccccatccttgcccttcctttcccctccatccctctaccctcactctttttgtgtaccaagaagatcttgtgattcttgaaagccagcctcaattccttctccaaatgcatcatcattttggagactagaagcagccactgaagtctggttaaattctttcaagagaaggtcaactcgaggctggaatcagtaacagacagagggaggaacagtagagagtgtaagtgcgatcacccatcgctcctctgccttcataactacattaatcattaatattacatacagaacaccctaaagacctccaagtccagacagcatccagggtttgtattatagcattgttctttgtgctactcattgttatttactcttcctcagattcagccaaacttattttaagaattttctttttgtacttttttaaggaaatttgctttacttcttagaatagttttatgtttgcagcagctatgaattgatggtatagaggtttcctacatgacctctgcatcttctcctaggaccagcatcctccacagagtggtacaattgatgggcttccattgatgtggcaacggcatccaatatgcagtttattaatactctaagtttatgcttgatatcgaacatggcctaagttagggaagacgtaaaatgacaggtagccaccactgcagtgtcctggggatgactccctggccagtgcattcttcatgctctgcctcttcattccccccttccccaaggcattagcaatcactcatcttgttaatgttaccatagctttgcctttttcagaatatatatttggaattacataatatgtaggctatgggtttcttttaattagaaaagcacagtttatagaccttttgtggcttttagaggcagtagtaactcatctatattttagcattatgcttttcagaatgtctgatgtatattttttttgtttccaagtactctcatctgtcatttgtctgcctgcataaaatcagaaaaaaaatgaaacaaattgattggatatttgtgaaaatcctttcttttttcatacttgagctttctcttatccaattcaaaactgaaattcaagatagcatacagaaattaaagatttccaataaatcctgccatgggtctctgaatcttgtgcactcacaagttgttcagggaaataatctccctgtcacagtgcattgtcaactgatgtgtgtagaggtacttggcataattctatacatgatcttaagtgaccacattgttggaagggggtaaaaaagaactaattttgttactgtttccccacttaaaaacattttctacctccaataatgatcacatcaacttgtttttctatttctgttttcccacacttgaatagcagtctgtcatttgagagggtctataaccttcaatgttgggtgagaagaaaaaagacagatagaaaaaaagaaggaaggaaggaaggaaggaaggaaggaaggaaggaaggaaggaaactcaaggacctggtttgagaactgctaccaactttttgttcaaattatcttctccttcacagacttctaaaacatatttaagcctttgcagttaagaagagaattcagagggaatagagaggcagagggtaaaggcacttgtctccaagtctgggggcctcagttcaatctctgtaacatacatggtagaaggagagaactgatgcccacaatttgacttttgacttccacacatgcgatgacacacatatacgcatgcatgctgtggcacatgtatgactacacacagagagaaaaaactgtcagaggtaaaacagaggaaatgaaatttctgaagaaacttctatgcccttgaatacagccccaattattagtaaatactctaaaaagtaatttgagcagtgtgtaattaagacagacattacatagcagattctccaaacactgtagtgacccctaacctcacacacacccattcctctttatttggccaatgctttgaactttactatctgaatctgcattgctgggttaaagtcttggcttcttttgaccaattttcttgtactaaatagaattctttcagcttcgtcaatcacttgtacactgggtgaaagaaagctggaacagcaagactgagggctccaggcacctgagtgacaaggcatgaggcacacggagtgaatgaagaacagaatcagatcaagttgatgaaaaaaatcagagtgctgcccactctgcagtttgtctgaggtttgtctgtgccttcatgtttccctaagttcaaaccaggcagtttatgttatagatcatagagctttctctagatgttttctagagttaagtcaggaaaggactctactgagtgttttctatgaagaacattctgtgttaggtgcttgaatttgctgggaggttggaggttaatgctatttacacagttgaaagttccagcataggtgaacctagttaggtctctgagcctctcagacttgccctcttcagctatgtatatgggtataaaattcattacacctacattgtgtgatattgatcttttcttgttgctgtgacaaagtatgtgaggctgagtaacataacaaaaatatacttagctatgtcacagctctgggttataagtccataattaggcagccacatctagtgagggcttcatgctccatcacaacatggtgggagaaagcagaaaggtagagagatgtgaatggaagagaagagaacaaagaaactgacctactttttttatgagcccatttttgcataaattaatccactcctataagggctaattctgtaccagaagaaagacactaatccttctccagagttccatttctcaataccaatggcttgacaaaagatacaaaaaccataacattctctgccatcttccacaaagccctaggacataagcacagtgacttgtctggagttatcttaataactgaatggccacttactatgtgttggcattttattcatgccaccttattggtttttaaagtgaatccatgaagtacttactgcaacctagtttaaagatcgagaatttgaaactagagatgttacctagttcaccaaagtgatacacgagtaaatggtgcagatatgaactgactcctgggatcataagtccataggtgatcatcatcttagctacagttcactgctcaaatatttaagacaatgatgcaattttgggtagggcacatctttaagtacatttgtgtgtgtgcatgttcatgtgtgtacagttgcacatgcatgtggacatcagaagacaacctccttgtcatttatcaggcagcatctaccttgtttagtaagaaatatctatgactagcttgcaatttgccaagtagctaggctggctgtctaatcccctgtattggctttttaacgtgagttcttgaaatcttactcagatcctcatgcttacatagtaggcactttgttaaatgggtcatcaccccagacccttttggttttggtctgatgtaatgtccatctcctcattcatgtgtaactactctccatagcgtctgtaatgtggatggttattattaaaccaggcatgccccttgtccttgtggtccatgggaaacatgactgtaactaacacctggaacagctctgtgaccatgttcatcttcttgggattctcagaccacccagaactccaaaccttcctctttctggctttcctgagcatctatctcttgacctttacctggaacttggccctcatctttctgatcagaggtgacacccgtttgcacacacccatgtacttcttcctcagcaacttatccttcattgacatctgctactcgtcctctgtagctcctaagatgctctatgatttcttcctagagcagaaaactatctcattttgggggtgtgctactcagttcttcttttttgttggtttgggcctcactgaatgcttcctattaacagcaatggcatatgacagatatgcagcaatctccaaccccctgctctacaccaccgtcatgtcccagggtctctgcatgcgcatggtggcctgggcatattttggtggcttcatgagttcttttattcaagccagttccatatttcagctccatttttgtggaccaaatgtcatcaaccacttcttctgtgacctcccaccaatcctggcactttcttgctccagcacattcctcagccaagtggtgaatttcctcgtagtgatcacggttggagggtcatcatttatcatcctcctggtctcctacagttacatagtatctgcagtcttgaagatccactctgtggaaggccggtggaaagccttcaacacgtgtgcctcacacctcatggcagtgaccatgctgtttgggacagcacttttcatgtacctgcggcccagctccagctattcattcaacagagacaaggtagtgtcagtcttctattcactggtgatccccatgctgaaccctctcatttacagtttgaggaacaaagatatcaaagatgccctatggaaggtgatggagaagaagaaagtgttttctagcttgtgagtggtcctccactctactggaggtgtacacaacccaaggtaccatctctccttctgccttagcaagggagatgttctgtgttcgtatttgaaaataaactataaaaacgatcccaaaaaaagtatggtgagagacaactgaaattgggtggcatttgggagggctatgtggaaacccagtgcagtggaaaactccctgaaatctacaagggtgaccctagcaacaactcttaataatgggggatacagagcctggaccaaccatcttctgtagccaggcaaggcttccagtaataggactgggacaccaacccaaacacaaaacttttggcctaaaatctgtcctgcctgcaagatgtgctggtgcagaactttcaggggtgaccaacaaatgactggtctaagcagaggcccacagcacaagagagagctcatgcccgacactgcctgaatggccaggaaccagagtctggataaaaaagaaagagaggaaggaaagaagaaaggaaggaaggaaggaaggaaggaaggaaggaaggaaggaaagaaagaaagaaagaaagaaagaaagaaagaaagaaagaaagaaagaaagaaagaaagatcaaggaaatgattcctagtggtattctgctatactcacagactagagcctaacctgatcatcattagagaagcgtcagtcagcaaccaatgggagcagatgcagagatccacagccaaacattagctggagctcagggaacgtggaggaagagcgagaggaaggactgtaggcgtcagagaggacaggcacaccagaagaacatgacctatggaatcaactaagtggggctcttagggacccaaagaaactgaaggagcaatcacagagcctacatgggtctgagagaggtcctctacatacatgtcatggttgtttagcttggttctcttattggactcctaacagctagggggtggggaagatctctgactcttttgcctgctcctatgacacttttcatcctactggttgcttcattcagcctttgatatgagagtttgtgtctggttttgttgtatattgttatgccatgtatggttgatattcctgggaggcctgctctttccttaagagaatcagaagaggagtgaattttggggagaagggggtgctgggaggaatgaagggaggggaaactatggtcaggatgtattgtatgggagaagaataaaaaagaaagtgaaaacaaggcccttcccatcggatgttctttgtgctcacttgcctgttgagttcaccaatcaagacaaaggtaaaattaatatctttataataacaacttacatctgggaatggtagcctacttgtttaatccctacactcaggggccagaagcaggcatatctctgtaagctgattctagtttggtctatataagtatcttcaagccagtcagggctatatagtgagatactatctaaaaaacattataataatgtattttataataatttgacaactatatgttattaggcaatgtataccaaacacaaaagttattaaattcagtgtttgttacaatgctttaattatatcacactatatgtaggatacaaaatgaagaaacaagatctcatcaggaaacccaacctgctcagcattacaccagaaataagggtagaactctagaacaggttcaagtattctggaaattgctccaaccagatggcagaatttgaagagatctgttatgcataggttatataaactataagaaaaaagtatctgctccaataaacatggtcttcttgttgaatttcccttatggctgctgagccattctctaagcaaatattaaaggacattgccctttgctacagcttctcactgtctctgatatataagaacctcaaaaacctgagtccagtggtccagtgatattccactgttgcttatctatctccacatctgtcatctattgagtcagtattgcctagattttaaccatgttattccttcagcaatctgacactgagaacagactccacttcagcttcatgtctgtcttaatgaacacttaactctcttctgcctgaagaggccccttcaaaatctctgtccctaccctgcctgagttaatatatgcagctccaggaagtgtatttcatattttccatcatctagggtaagatagagaaggctttcatttccatataactgttctttaaagggaaagacatttaaagtagatttgtccatcagagatagctctactagaaagatatactctggtttctttgtgtctttagacactttcaacatactcccttttgccagccaggccacctgaggacccaatggagccatgcacctcccacctgcctcctgactatatacccatcttcccaagatctgttgtccccaacatgacaagacattacagaaggtaggacatctagacttggagagccacaccaaaaggcaggacagaagaagccagcaggttgtctgtcaacctttgaatagtgtaaacaaacagtaacagacaagtttcacaaaagaaaagaagctttcaaccttcttacaaccttcttacaaagtaagaagcttactcttctcctgaacattgtacaggccaatgcactgactttttagtaagtgcaggcttagcagcaatgcaaagatttaatgtcattttattgttcaaataaaagaactgttgtgggatatttgtacactgtgtgaaaatgtgtcactgtgattggtttaataaagagctgaatgtccaatagctaggcagaaagaggttaggcaaacttccagggacagaaaggtctttgggaaaaagaaaggtggaattgccagccagacacagagaaaaatcaagaagtgcacgatggaagaggggtaatgtagattgatataaatgggttaatttaacttagaaggtataagagctagttagaaacaagcctaagctataggtcagacgttcataattaagaagtctccatgtcattatttgagaactggatagtgggacagaagaaaagattcgttatagagaactattaccccatatagggaggaatatagtcaatgcatggagaggagaggtagctgtctcaggtttcctggattcccaaatttaattcccatgtaagaccaagaaactttaagatgacctctacaagtcatatacagtcattgcttcacatacaaaactttctaccttgtatgctaactagaaataaagaaaaaaatcaaagtattaggataattttgtaggtaaaagtgcttactacacatgcctgatgacatgagctccatctctggaatccagcatggaaggagagtgctaactcccaaaagttgtcctctgacctctacacatagcactgtggaatatacaagtgcacacatgtgtacacacacatagtaataataaataaatttttaaattaaaaatatcaaagcatcagctgaattactgatagtgttcaagggaggataaggcttttatctgacccagtggcttcttcagacaggttaacccactcaggaggagccctgtagtgctgtgcttactattgctatgcctacccagcagcttttaaaaatatggcatgctttctactacaaggagacagaagccactgaaacagaaaggtgggggatctgagctatcctgccaattttccccagaaaacaatcctataagtcatgtcaaccttcctgggacaggccgagtgaaagaaaagcataaaacaagaagaatcctttcattgtaggctccccttctaggagagatgaaaatagagttccacacacctgctgagatatctagacttcttctgctgtcattcaccaaataatgaactgaagcaccattcatgatgacatccatgccaggaggaactcaaaaggagcaaccagattgccaggaatcctcaaatatcaacttagggctctgtaatgatgttcttaaccaatgcctgtattttttaggacaattaaaaaaccaagatgattattttaaatgttttggaaaataatttaataaacattttgaatttttattatcaaatgtcacacacacacactagaaaaacatctctcagagaagcatctcaaggttcctaagcccaacaactaaatccctgtgccatttttccctatcccttaacccatcaccattataaccattggtaatgtaatctatgtcatatgcccctacagacaataaactccatgaatgtagaggtcacactatttatctgatacccagaagggactaaatgcatattttgattgatcactattactgatgtttaataggaaatcaataatatgaggaaattgtggcgtccatcatataaaactggctgtttcagatgtctgtacatgggtgtgaagaactccatatgaagcccaatgctggtctagcccagagaagtggattatggggattgttcagacttccctgaatacattttcattacctcctcattgtcttctcatggggaggatgcagagagtcaggggaagtgagcacagacatacgtgttgcttagtaactttttaataactcccattgcatctgcaagcacaagccttctccattgaaaattacacttactacaactatctgacacaaatccctatgctgactagtatattagacttctaatttggcgtttgggggaacactgcaggctgtgcatgtgtttgggtaaagaagggcagagccttggcaatggaaaacatggcaggcttctgtttctaacacaaaggtaggtgaaagcatcctaaagacttgataaaacttgtgatttatgcagtatacagtctttaatcactgaaaagtaagacattcagtagtaatttaaatatatatcatttttgaattaaaagttaaaaacccttagctaggtgtgatagcacacacctatgatttcagcactcaggccagccttgtttacacagagagtttgatgccagctagagctacatagtgagaccttgtctcaaaaactaagatacacataaggaaaaggtaagatttctagcaaaaaaaatcatacttctgaagacacatttaaattaaaaggtgatattttatgtcaaactccttgtatgagcatctactgagtatctgtgatatacagtatattaactcccatggtccttttctaaaaagaagattaaaagatagcttgaagtaggaagagaaacttgactcatagtgatgacaacagtgtgataacactggtgcctacatttgtgtaagtcatgatgtacactcacaggcagacagacagctcactgactctcacagtaacacaaaggagtagaaaatgtagtataagttccaaaatggtgtagagaagaacagacatttcttggggacctactacacattacacactcatgtccattagatcatatgtctgtcccaaaagaattattgaataactgatgtatatgctaggaaggtgctaccaattcaatagatatgaaagaaagctgacttcaggagctttgcattttaaggaaaagatagatatataagatgctggactgccataagcaaagcccactgtgaagaaaaccctaggcttctcattttatggaataatatttcaaacttcataatggctaagttgctcaaggttagaatcagaatgtaaactacttgaacctgaccacaatagttgtgtcctttgggcaagttgcctctcaagctgatgatacaaccctgaggggatcatgtagaatggccatcacttgatgctgacctgttcttgagcatacacctaggactttctaaagtgaatggccacaatcacaggtaaatgctagccctccaaagagaggcaagctgccaatagctttgatctaagttctgagggaacagaatggacaggtcccaggttcttcattgaggcaatgttcacagagctttaagaaatgaaaagaaaacccggagctgacccccactgccccaacacacacacacacacacacacacacacacacacacacacacacctttcatcaacaattttacagaaaaggaaagaaaaatatacaatatcagagttcaaatcattagagaaaatatttcacttcacatggtgaatatgtgttacttactttaaaatcacaagatatttaggcatttggtttattcatcctttaacatgaattcctaaaacagaatttcatgctaataatgttttcacactttaagttttaatacatatttccaaaatgtcattcctccaaattttgtccctgatatttaacatacttgaagatatttctttccccatattcatatctaagtaacaggtcttttcaacattggccagtattctacatgaaatattatatctgattacaattttagtttacatttctttcattaatagtatgattaaccatctctttatatgtgggctgatcacacatctgtgtgacttcatgtcttcattaaagatattaagaataagccaggcaagatagatagatagatagatagatagatagatagatagatagatagatagacgaatagaatagaatagaatagaatagaatagaatagaatagaatagaatagaatagaatagaatagaatagaatagaatagaataggccagcatggtggtgtacatcctagcacttgagaggcaggggaaagcagatatctagaagtttgaggccagcttgtttacatagtgggtttcaagacaagcaaggatgcataaggaagaccttgtctcaaaaacaataaagattaatggtttgtttggacccactgccagtgacctcatatattgtcccagtcacaccgttgtcacctatattaagggttttcacctatattatgcaggctccctcacttcgattgtactccaggagtttggccccattggttaggtgtggatttctgcatctgcttccatctttttctggaagagggttctagcttctctggggttgtggattgtaggctgggtatcttttgctttatgtctggtatccacttatgagtgagtacatactatatttgtctttctggttttaggttatctcactcaggatgttttttctagttctgtccatttgcctgtgaattttaggatgtcattgtttcttactgctgagtagtactccattgtgcaaatataccacattgtctttatccattcttcagttgaggggttatttccaagatctggctctgtttatttatttttatgtgtattagtattttgactgcatgtatgtctatgtaccacttatgtgccttggtgcctctggtacctatggaggccagaaagaggcatcagatccagttgaatcacaaatggttgggagccaccctgtaggggctaggaatcaaaacccaggtcctctgaaagaacagccagttgcttttaacccctaagccatctaggaagtctactaagtctgttccatcatcccgttgaggcaggaccaaggaccctctctacccccacacacccttgtgtctaggctgggcaaggtatctctccatatagaatgggctccaacccttccaaaaactatttttaaaactttcaattttattctaatattttcactgcttgaacatttgatttctatagttttcattttctgtgagaaatacataagtgttgcactctatttcagttttaagtatgcatatgtaaaaagaagtcagacattcaagcacatttagaattaaggtcagtcaaaactagaaacttaatatgtcatgtgactttaagttgatttctgggaatttgtcttaaagaaattatagatgcatgcaaagaaaatcattcaccaattgctccatgctgcattatttggaaatactaattagattccactagtcaacttaagaggaacgtgacacttatgtggccctctctctcctatgccttcagataggttgactccatgccactcatcactgactttccaatatccctttctcagctccaatctcccgagactgctttctcacccagatagtgtcttgttcctctcaatccttcataacaaatatgattcctaccctgcctgatttattctgtacccgtgtaagtttctgtcttagtaagcatgtccatcaatctgcagaagatcgggcagattctatagcatcagtagcaagatatatgcaagccatggctacacattttttaaatggtgtaaatcattaagccacacacacattttgaaaagcaaaaccaagatagttagttagtaacaaagttctgattgtttctaagatgagcattactaaagtccccctgtacaacagaaacatttctcctggagcttcacagataatgccttcaacaacatcattagatgcattttcttccttgtagatacatttgataaaagacaaagtttcacgtagagtgtatcacctgcatgacttactccagctgcttaacaagtgagtgaggattagagaaacaaatcccttcagaatatccggtcacaaggagggccttactaagtgctgacacattgaagtaagaatcctatggcgttgtgcaccctggggaaatgttttaactaaatgacttttttaatgataggaatatcaggaatctaagtgcccacgggatttttatttaagtgttacatgtgtcctaatttctcaagtaaaggagttaaagttgacccaattttgaggtaattttaaagaaaaaacatgagcaattgattgtttgtggaattctctagaacacttttattttgagggaaaatgttttcttttctccatctatattcttatctttattatgctgtctttttcacactgaattgcactgcttcaaatgtcagcactccgcctctactcctgaactgaaagttagtcatttcagctgtctgaattatattttaaaaaattctgggatacaatttgcttaggaaatgcagacattcttattgagactgatcttattccctaatgactcatttctgttttggaaacagaaactatttttatatcatatagcaatagtataaagtctttgaaatacacatcagacactctggctaaccgttctcttttcctaatccatagtctgaatctgaacaaactaacaactttcttttttactgctgtagtgaagagcattggtctgagccacctctaatgttctgtgaagctttaatgacaagttcttctgaccattaaacattctggtcactaaacagccctgaacatccaccgctggccctcagtctgccagtgccctgtgagtccacagtgagatccggctttccagtttgctaaagagcagtactcacgagggcctgattcttccttcctatctgaaggttaggcaatgagaattaaataatcaggctacttaactaatggtgtaagctttatctgcccatcaagatgctgataagccaaattaattcccagacttgatctggcagagtagtgtagtcacaaatcttctggatattgttaaggtcggaggatcagtggacactgattaaacataccaagatagattttagacaaaacgtttacaacgagaaagaaagtttgagctcaactccagatacaaggatgggtggtcgtttacagcaatgagccaatgagaatgagagggttagtggaaattagagacaaaactaaaagtgcatgtggggagcaggatgagtttcattaaactggctaaaatgaattcttgctacagacaggccaagcactcagatacacagattttgatattagagatgaggatgaagaatttgattgggcaccaagggtgggggaatctcattaaacagacttagcaggttgtttgttgtaactgggtttggaaagaaaggacaagaaggccaagtctgggaagctggtgagaagaaggctcaaaggagcctaacccaatatggtcaaggagaattacttgaatttgagtaacagcaactatgcaggggtaggcaagtcatgcactaatttaagcttcaaagaaaattataaccactctgaagatcccatagactttcaggtgaaaatcaagataaaattgcagggttttgaaagacctcagtgaaatgtgcagaatgccctccatgtgaagaagttatcctcacaaggcagaggacaaatcataggtaaatgactacagcatgggaacctctccctacccagaaaaaaaggcttagactatgatggttctccctgcaaaccaaggaccatcaggataaggaatttctagatcaaaaatttaagagtctgttctagttctcctacatagtcatgactgtctgagtactttaaaaatccctaacaacaaaacaatgtgtaacaaatgatgtttcaacctcctgcgccattctccaaaccctaaagtatcttctccgcaggtatatgtgacagaagcttatcccagtcatgggccagataaaccacaccaatgtgaaagaattcgtcttcctggcacttactcgcttccgagagctggagttctttttgtttgtggtcttctttctcgtgtatgtaacaactgtgctgggaaacaccctcatcgttgttaccatcacctttgagtcccgcctccacacccctatgtacttcctcttgaggaacaaatccattctggatattattttttcatctatcacagtccctaagtttctagtgggtcttttatcagaaaggaaaaccatctcctacaatggctgtttgacacagatctttttcttccactttgctggtggggcagatattttcttcctctctgtaatggcctatgacagataccttgcaatttctaaacccctgcactatgtaaccataatgaggagagaagtatgggtgaccttggtggtggcctcctgggtgggtggtggtttgcattcaattgtccagataattctaatgcttccactccccttctgtggccccaacaccttggatgccttttactgtgacgtaccccaggtagtgaagctggcctgcactgacacctttgctcttgaacttctcatgatctccaataatgggctggtgaccctgctgtggttcctcttgctcctgggttcctacaccatcattctggttatgctcagatcccattctggggagggacgaaacaaggctctctctacctgcacctcccacatcatggtggtgaccctccatttcgtgccctgtgtttacatctattgccgacccttcactaccctgcccatggacacagccatatctatcaataacactgtcatcacccccatgctaaaccccatgatctacactctcaggaaccaagagatgaagtcagccatgaagagactacagaggaggctggggccttctgagagcagtaagctggggtgagccatctggtggagtccagaagtctaaggctaatttagttctcggcatctgctagtctaagaataagagagaactggttctatttatcttctgtggtattgatgtcaccatatgccttctatgatataaacatgcaaatccattagaggaactgtgaaaataaaatgaagagatgggaccagacaatgtgtattttctgacttggatcaggtgagatgtccaggagaaattactgaaatcaatcccataagggccactatactgtcatatgttgctctcatgacaacccttctctgcttcaccacctctgatgcagaatagcactagtgtccacagagttatcagagaatgaagtatggttcatagtgtgagggtggtagttataaaagtcagcattgctacaaatgtggattcatgttccctgttagctatccttatagtcctaaatatgcatgtacatattagtcaattatttaagatggtgttacataatgaatacagtattataaatgtatttcaccaattagggaaaagagaaggaattatttaaattgggttaaatatggagtgtgtgtgtgtatgcatgtaaaaatctatgtctaaaaccttttgtctaagtattagtagactatcctagacagttcatcatagtttgaaataaagcaaaaactacctaagaaatatcttccaccatcaagacctattttaataacaatattgaataaaaaagaaatatgttggtgtagtcatttacaaatgaccattggtgggtcttgaggtagattgatatccaatgttctgagaaaccatgatactgatttccaaagtggttgtacaagtttgcagtcctaccagcaatgaaggagtgttccccttactccacatcctctccaaaataagctgtcatcagtgttcttgaccttagctgaatattctgagaggtgtaaaatggtatctcatagccattttgatttgcatttccctgatggctaaggatgttgagtaactaccttaagtgtcttttggccatttgagtttcttctgttgagaattctctgtttagatctgtaacccatttttattagattatttgttattttgatgtctagtttcttgaatcctttatatactttggagatcagccctctgtccaatgtggtattgaatatctgttcaaatttacctttacccacaggaagaatttcaactgtgtatttgtaaagacaatttttctcaaattgtccacttctgtctccccacagtctttcaaactcaagtaaaaagaaaaaagacaagaaagctcaggaaattgaggcacattgaactatttttactacagagtaccaaattgctatagtgcataatatttagtcaggaagattctagtagataatatccatctatggtcctccctgactcccataaaacaaagttacttgcatccaagacttatgatcacagggcagtgctttttagcctttcttttttatttattatttcaattttcacatgcacatatgtgtgtatatatcaaagtactgtataaacatatatactattgcacatatatacatatacagtattttgataatcatacacacattatgctctcttccctcctactctcacaaactccttcttctcaaggatgcctcctcctattttcataccttctttattaagacctactgagtctaattagggttgcttatatgagtataggtgggggttatttatgtgagcaagacaaacttactagtgccaataacaatgagaatatgacctccccatagcccaacaataatattccaggatgcaatagtcacaagacctgtcttaaacaggtcttatgcagataaccaccatactgtgagttcatgggtgttacaaccaattcatgtccagaagactgcatttcacagcattatttcccatcctctggcccttaaattctgtcaccttttctttgatatcccctgagccttgaagtgggtgttattgaagtcttgtttaaggctgagaattcaataatttcaggactctgattcatcctcagattttcttaaatcactgtcccttaatgaactgcattaaatgtttttcttgatgacccctacaaagaaatttcttaccaaagatttattatatatcttttcacgtaaaatgttcattgaagagccacacactactgaaataaccaggatgcttttgcttcccccagaatcagttgtccctttgccccatgaggaatgagtggtcctaagacattagatgctcccacagaccaatgtttctcaaaaactcagagaaaaagagaatgcatagctttgtgcctactacagaatttgaaagacagctgccctgattagcattaactgtcaacttaatacaacttagaaatattttctgtaccaattcaaacaagggtacctcacactttctcttctaagagattcagtgtgtcagttcaggctcccctgcagtgctaggggacacatgactccaggagtctgctcacagtgtccgaacttggccggctggctccagcacacccagagacagccaaggccccagtactagtcctgcctcgatccacaagaagaagactgacatcagagtattggaactgtttgcatataccagaagggaaccaggagaggaagagactccatctacaccgacaggaagaaaggatgggaagaacacaatataaaagcattcaacaacagaaaaaccaatatgacaccaccggagacaagggaccatacaccaacaagaacagaacatcacaatgcagatgaagcagaagagaatgaccttaaaaacatcttcatgaaaatgatagagggcctcaaaaaggatataagaaaatcccataaagaaatggaagaaaaacaaaccaaaaaatgtaagatatcaacaaatctttcaagtaaacgcttcaagacctaaaaactgaaatagagacaataaagaaaacacaatctgagggaatgctggaaataaaaaagctggataaacaatcaggaacaacagatatacgcataaccaacagaatacaagagatggaagagagaatctcaagagttgaacacactagcagaaatagaatcatcaaccaaagaaatcttaagtccaaaaaatccctaacacaaaatatccaggagatatgggataccatgaaaagaccaaacctaagaataacaggtatagaagaaggtgaaaaaatccaactcaaaggtgcacaaaatatattcaacaaaataaaaaaaaactttcccaacctaaagaaagacatgccaataaaaaaacaagaaacctacagaacaccaaatagactgaaccaaaataaaaggtatcctcgccacataataatcaaaacaccaaacatatagaacaaacagaaaatattaagagcagcaaaggaaaaatgtcaagtaacatataatggcaaacctatcagaattacacctgacttttccatggaaactctgaaagccagaaggtcctgaatagttattccaccaacactaagagaccatggataccagcccagactactatacccagcaaagcttccaatcaatatagatggagaaaacaagatattccatgacaaaaccagattcagacaatacatatccaccaatccagccctacagaaagttttggaaggaaatctgcaactcaaggaagttaactacaaccagaaaaatataggcaatagataatcccactttaccaacagtcaaaaggaaaaagggataaaatcccacacataatttcaccaccaacaccaaatgaaaaataaacaagaatgaacaatcaatggtcgttaatatccatcaacattaatggtcttaatacacctataaaaagacatagactagcagaatggataagaagacagaatccatccatctcctgcataaaagaaacaaacctcaaattcaaagacagaaggtacctaagaattaaaggttggggaaagcttttccaatcagatggacccaagaaacaatcaggggtagcaatcctaatatccaacaaattggactttaaactaaaaatcaatctaaaaaagatgaaggaggtcacttcctactcatcacaggagaaatccatcaggatgaagtttcaattctgaacatttatgccccaaatacaaaggcatccatgttcgtaaaagaaatattagtaaaactcaaatcacacataaaaccccacacacttatagtgggagacttcaacaccccactctcaccattggacaggaacaccagacagaaacttaacaaagaaacaaaggaactaatagaagttatggcacaatttcacttaacagatatctatagaacattccgtccaaatacaaaacaatttaccttcttctcagcgccacatagaaccttttctaaaatcaaacacatacttgacaacatagcaaacctcaacaggtacaaaaaaactgaaatgaccccctgtatcttatcagaacaccatgctttaaggttaaaattcaacaacaacaggaattacagaaaacctacacactcatggaaattaagtaacacccaattgcacagttcatgggtacaggatgaaataaaaaaaaagaaattaaagatttcctagaattcaaatagaatgcggacacaacatatccaaacctatgggatactttgaaagcagtgctaagagaaaagttcatagtgttaaatgcccacatgaagaaacaggagaataatcacactagagagttaacagcacaactgaaagctttagaaaacaaagaagccaatacaccccggaggagcagaaaccaggaaataatcaaattgagggctgaaatcaataatatggaaactaggagaacaatacaaagaatcaatataacaaaaagttggttcttcgagaaaatcaacaggttagataaacctttatccaaacttaccaaacagcagagagtgaacatgcaaattaataaaatcaggaatgaaaagggggacataacaacagacacagaggaaatccagataatcatcaggtcatacttcgaaaacctatattcctcaaaattcgaaactctataggaaatggacagttttctggacagatttcacttaccaaaattaaagcaagaatagataagcaacttaaatagacctataacccctaatgaaattgaagcagtcatcagaagtctccaatcaaaaaaaaaagcccagggccagatggcttcagtgcagaattctaacagaaattcaaggtacagcaaataccagttctcctcaaagtattccacacaatagaagcagaagggtcattaccaaaatctttttatgaggcttcaataaccttgaaacccaagccacacaaagacacaactaagaaagagaactacagaccaatatccctcataaacattaatgcaaaatttttcaataaaatactggcaaattgaatccaagaacacatcagagaatcatccaccacgatcaagtaggcttcatccagggatacaaggatggttcaacatacaaaaatccatcaatgtaatccaccatatgaatagactgaggaaaaaaacacttgatcatctcactagatgttgaaaaaacctttgacaaaattcaacaccccttcataataaaggttttggagaaatcagggataacaggaacatacctaaacatgataaaagcaatatatagcaagccgacaggaaacatcaaattaaatggagagaaactcaatgcaattcctccaaaatcagggacaagacaaggccgtccactctctccatatctcttcaatattgtccttgaagttctagctagagcaataagacaacaaaaggagatccatggaatacaaatcagaaaggaagaagtcaaactctcaactatttgcagatgatatgatagtctacataagtgacccgaaaaactctaccagggaactcctacagctgataaacactttcagcaaagtggcaggatacaagattaactcaaaaaaatctgtagccctactatataccgatgatacattggtggagaaagaaatcagagaaacatcaccctttacaattgccacaaacaacataaaataccttggggtaacactgactaaaagcatgaaagacctatacagtaagaattttgagtcttgtcagcattggtggcgcatgcctttaatcccagcactcgggaggcagaggcaagaggatctctgtgatttcaaggccagcctggtctcaagagcaagtgccaggataggcttcaaagccacagagaaaccctgtctttaaaaaccaaaaaaaaaaaaaattttgagtctctaaaaaaagaaattaaataagatactagaaaatggaaagatctcccatgctcttataggtaaggatccacatagtaaaaatggcaatcttgccaaagcaatctacagattcaatgcaatccccatcaaaatcccagcacaattcttcactgaccttgaaagaacaattctcaactttatatggggaaacaaaagacccagaattgtgaaaacaaccctgtaaaatagaggaacttctggaggcatcaccatgcctgacttcaagctctattactgagctatagtcctgaaaacagcttggtattggcacaaaaatagacaggtagaccaatggaatagagatgaaaaccctgatattaacccacacacctacaaacacctgatttttggcaaacaatccaaatttatacgctggaataaacagaacatcttcaacaaatggtgctggcataactggatgtggacatgtagacgaatacagatagacccaagcctattaccatgcacaaaacttaagtcaaaatggatcaaagacctcaacataaacgcagccacaataaccctattaggagacaaagtgagaaatacccttgaattaattggtacaggagactgcttcctgaacattacaccagtacataggcactgagatcaacaattgataaatgggacctcctgaaactgagaagcttctgtaagcaaaggacacagtcagcaagacaaaacgacagcccacaaaatgggaaaagatattcaccaaccccacatctgacagagggctgatccccaaaatatacaaagaacttaagaagcgagtctctaaaacaccaaacaatccaatttaaaactggcgtacagaactaaatacagaattctcaatagaggaatctaaaatggctgaaaggcacataagaaagtgttcaacatccgtagccatcaaggaaatgcaaatcaaaacaactctgaaatatcatcttactcctgttagaatggccaaaatcaaaaacaccaatgacagtttatgctggagaggatgtggagaaagaggaatactcctccactgctggtgggagtgccaacttgcacagccactttggaagtcagtatggcgactcctcaagaaattgggaatcagtctaccacaagatccagcaattccactcttaggcatatacccaaagcagcacattcatacaacaaggacatctgttcaacaatgttcttggcagcactatttgtaatagccagaaactggaagcaccctagatgcccctcaacagaagaatggatagagaaaatgtggtccatttacacaatggagtactactcagcagaaaaaaaacaatggaatcttgaaatttgcaggaaaatggatggaactagaagaaaccattctgagcttggaaacccaatcacaaaaagacaaacatggtatgtactcactcatatgtggattttagacatagagcaaaggattaccagcctaaatccatactgccagagaagctaataaacaaggaggaccctaagagagacatacatggtcccccagagaaggggaaagggtcaagatctcctaagcaaattgggagcaagggaggaggaggcagggagctaggaaaatgagaaggggagaagagcagggttgaggaggacatgagagagcagaaaagtttgagccgggggaagaatagaagaaaacaagaaaggagataccataatagagggagacattttaggtttacagagaaatcaggcactagggaaaggtctggggatctacaaagatgacaccaactaacagtctaagcaacagaggagaggctaccttaaatgccctcccctgataatgagattgatgactgtcttatatgccatcctttagccttcatccaatagcttatggaaatagaagcagacacccaaaggtaatcactgaactgaactggaatccagttgcagagaaaaatgagtgatgagcaaaggggtctagaccaggcagaaacccacagaaacagctgacctgaaccaaaggggatctcttggtccccagactgatagctggaataccagcatgggattgacccagacccaaggaacgtgagtttcaataaggagacctcggaaatctatgggatctcctttagtagttcagtacttacccctagcataggtgtggactttgggagcccattccacatagaggaatacttcctgagccaagacacacagggatgggcccaagtcctatcccaaagtatatgatagactctgatgaccccctatggaaggcctcaccctccttggggagcagaaaggatatgtgataggtagggttttagttgggagggggtggtaggggaggagaggagggagagggaactggcattgacatgtaaaacaatcttgtttataattcaaataaaaagaagagattcagtgtggctggttttaagttgaggtctttaatccatttggacttaaatttcattcctggtgatagatgttgatctatttgcagtcttctacacaccagcatcaagacaggccatttgttgaagacactttcttttttccattgtataaatttagtttctttgtcaaaaatcatatgttcgtaggtgtgtaggtccatttcagaattttcagttcaattccattggtctacctgtctatttttgtgccaataccatgatgtttataggacagctctataatagagctggaagtcagggatggcgatgcctccagaagttcctttattgtacagggttgttttggctatcctggttcttttgcttttccatataaagtggagtattgttctttcaggtctgtgaagaattgttctgggatttttatggggattgcattgaatctgtagatggcttttggcaagattaccatttttactatgtggatcttacctatccaagagcatgggagatcgtcccatattctggtatcttctttcatttctttctttagagactcaaagttcttgttatacaggtctctcacttgtttggttagcattaccccaagatactttatgttggttgtggctactgtaaagggtgatgtttctctgatttctttctcagcccatttatcctctatatataacagagttactgatttttttaattaaccttgtatcctgccactttgctgaagatgtttatcagctgtagtagttacctggtaaggctttttgggtcacttatgtaaactatcacatcatctacaaatagtgaaagtttggcttcttttccaatttgtaaccccttgatctccttttgttgtgttattgctctagctagacaatattgaagagatatggagagagtggaagccttgtcttgttcctgattttagaggaatctcattgtgtttctctccatttagtttaatgttggctgttgggttcctgtatattgcttttattatgtttaggtatgttcctgttatccctgatgtctccaagacttttatcatgaaggggtgtttgattttgttaaaagcttttccagcatctagtgagatgatcatgtgttttttctttttcagtttgtttatatgctggattacattgatggattgtcatatgttaaaccagtcctgggatgaagcctacttgatcatggtggatgatttttctgattgttcttggatttgatttaccagtattttattgcgaatttttgcattaatgttcataagggatatcggtctatagaacctcttagcagagaaagtgagacctacccttgaacaaattggtacaggatactgcttcctgaacataacaccaatagcacagacactgagatcgacaattaataaatgtgacctcctgaaaatgagaatcttctgtaaggcaaaggacacagtcagcaagacaaaatggcagtccacagaatgggaaaagatattcaccaaccccacatctgacagaggactgatctccaaaatatacaaagaactcaagaagctagtctccaaaacactaactaatccaattaaaaagtggagtacagaactaaatacagaattctcaatagaagaatcgaaaatggctgaaagacacttaaaaaagtattcaacatccttagccatcagggaaatgtaaatcaaaacaactctgagataccatcttactactgtcagaattgctaaaattaataacaccaatgacagtttatgctggaaaggatgtggagaaaggggaacactcctccactgctggtgggagtgccaacttgtacaaccactttgaaaatcagtatggtgactcctcaagaaaatgggaatcagtctaccacaagatccagcaattccactcctaggcatacacccaaagaagcacattcatacaacaaggacatctgttcaactacattcatcccagcattatttgtaatagccagaaactggaagcagcctagatgcccctcaactgaagaatggatagagaaaatgtggtacatttacacaatggagtactactcagcagaaaaaaacaatggaatcttgaaatttgcaggaaaatggatgatggaactagaagaaaccatcctgagtgaggtaacctagtcacaaaaagacaaacatgagccttcatccaatagttgatggaagcagaagtagacacccacaggtaaacactgagccaaactcctggaatcggaggagtgatgagcaaatgggtcaagaccaggctggagacatccacagaaacagttgacctgaacaagggggagctcatggaccccagactgatagctgagaaaccagcataggaccgatccagaccccctgaacagggctgtcagttaggaggcctgggcaatctatggagcctccagtagtgagtggatcaatatttatccctagtacacgaatggactttgggagcccaatccacatagagggatactctctcatcctagacacaaggtggagggcctaggccctgctccaggtgatgagacaaactttgaagatcccctatggaaggtctcgccctccctggggaacagaaagagcatagaatagggggtcagtgaaaggcaggggaggggaaactgggattgacatgtaaaacaagcttgtttctaatttaatttaaaagaaaaagagaaaaagaaatatcttggaagggactctcaattgagaaactgtctaaaacaaattgatctgcatacatatctattggaaatggtcttgattgttaatttatgtaggagagtccagtccattgtggacagcaccattccctaggtaggttgtcctgaattctatatgaaagttaccagaagataagcctgtccgccagcaaataacatattctgcggctactgatacacttctttggctgtgaagtacattcctttattggaggtactgttatatagaatagcaagtagacctgctattaaggttctattttgacttccctcaatgatggacaataacctggaatcattagctgaataaaccctttcctccattaatatgcttttagttggggtgttttataacagcaacaaaaatgaaactaggacagccatatggaaacttactacttcataagcaaattaaaaatatgttagtttaaaaatggagaagggaaatatcatttgtggctagataatgatgcttctggaagctatgagttacataaaaataattcagtgccaggtggtatacctccttagaagctgtttttcaggaagcccccccaaaaaagtacatatttcttactattcattatggtctaccagaacaagatgataatattctattactaaatgcaacatacacctttgttgtaagataaagagacaccatgctgtaattgacatgtaaagttctttcctgttgtatagttttcatattgcttaaaaggtgctacacaggctgctgagaagtaaaagtcatcaacagccttactcagcttcgacctttatgaactatgacaagacccaccatgaaggatggccccactggtgcaatggcgagacttctatgggggataagcaacttctctctgggtggatttaatccccagtcaacaagaaagaattcatgcctggtactgtaaaccttgacaaaaacccatagctttgtggagctggaatgtcataactttatgggaggaatttacttctggtgttcagctaaattgatgtggtaccaaactgccttaaaagtgtgtgtgtgtgtgtgtgtgtgtgtgtgtgtgtgtgtgtgtgtgtgtgtgtattacagccagctgtagagaagcttctttagacatgaattatgctaaattcagagacttatggctactcaagatactgagaatacgtgacagttaagtgttctgcccaaaataggacatttataccatcctccctttcaaaagttcataggaaatctggaaaaaggagagaggaaacataaacaacagaagatctggagaaaggctctgaaatactatcttcttgacatgacacagacattctgatcatgaccctataggtgctgcacttctctgcactaggcctgcacaagactgagactattaaaaaaaaaaaaaaaaaaaaaaaaaaaaaaaaaaaaaaaaaaaaaaaaaaaaaaactcttagagtccttcttgtttcctagttcctttggtgatgaggattgtagcctggtaatcttttgctctatgtctaaaattcatatatgagtgagtatataccatgtttgtctttttgtgacttgcttacctcacttttctacttccatccatttgcctgcggatttcaagattccattgcttttatccactgagtagtactccattgtgtaaattaccacattttctctatccattcttcagttgaggggcatctagattgcttccaggtctggctattaaaaatagtgctgctattaacatcattgaacagatgcccttgttgtatgaatgtgctttttttggatatatgcctaagagtgggattgctggatcttgtggtagactgattcccattttcctgaggaatcgctatagtgatttccaaagtggctgtacaagtaggcactcccaccagaaatggaggagtgttcccctttgtccacatcctctccagcataaactatcattggtttttttttttttttattttagccattctggccggtgtaagatggtatctcagagttgttttgagttacatttccctaatggctaaggattttgagcacttccttaagtgtctttcagccattttagattcctctgttgagaattctctatttagttctacaccccaccttttaatttcactgtttggtgttttggtggctagcttttttagttcattgcatatattagatattagccctctgtcagatgtggggttggtgaatatcttttcccattctgtgggctgtcattttgttttcctgactgtgtcctttgtcttacagaagcttctcagtttcaggaggtcccatttattaattgtagatctcaatgtcaatgtctgtgctactggtgtaatgttcaggaagccgtctcctgtaccaattcattcaagggtatctcccactttctcttctagaagcttcagtgtggctagatttatgttgagatctttgatccatttggacttaaattttgtgcatgatgatatatatggatctatctgcaatcgtctacatgtcctaattcagttgtgccagcaccatttgctgaagatgctttcttttttccattgtaaaaatttagcttctttgtcaaaaatcaggtgtttgtaggtgtgtgggttaatatcagggttttcaattcgattccattggtctatctatctacttttgtgccaataccaagctgttttcaggactatggctctataatagagcttgaggtcagggacggtgatgccaccagaagttcctttattgtacagggttgttttggctatcctgggtcttttatttttccatataaattggcatattattctttcaagctctgtgacaaagtttgtttggattttgatggagatcatgttgaatctgtagattacttttggcaagattgccatttttactatgttgatcctacctatccaagaggatgggagatcttcccattttctggtatcttctttcatttctttctttaacgactcaaagttcttactgtacaggtctttcacatttttggttatgttgcttgaggatattgtgaggggtaatatttctctgatttctttctcattgcgtttatcatctgtatatagtagggttactgattttttttaattaattttgtatcttgctactttgctgaaggtgtttatgagctgtaggagttctgtggtggagtttttctgggtcacttatgtaaactatcatatcatccgaaaatagtgaaagtttgacttcttcctttctgatttgtatccccttgatctccttttcttgtcttattgctctagatagaacttcaagtacaatattgaagagatatggagagagtggacagccttgtcttgttcctgattttagagtaatcttttttagtttctctccatttagtttgctgtatattgcttttatcatgtttacatatgctcctgttattcctgttttctccaagaaggaatgttggattttgtcaaaggctttttcagcatctagtgagatgttcatgtggtttttcttctcagtttgtttatatggtggattacattgatggattttagaatgttgaaccatccttgcatccttgggataaagcctacttgatcatggtggatgatgcatagaccccggagaaggggcaggatctcctgaggtaattgggagcatgagggtaggggagagggatctgggagaatgagatggagagaagaggagaggagaggaggaaaggcaggaacaggaaggttgagtcaggggaagaataaaggagagcaggatgagagataccataacagagtgagccattataggttcgaggagagatctggcactagggagatttccaaagatctacaaggatgacaccaactgacaatctaggcaatggtggagaggctaccctaaatgcccttctcctataatgaaactgatgactgccttatatgccatcctagagccctcatccagtggctgatggaagcagaggcagacacccacagcgaaacactgaactgaactctggaacccagttgcagacagagagaagtgaagagcaaagaggtcaggaccaggctggtgaaacccacaaaaacagctaacctgaaaaagggggagcgcatgaaccccagacttatgtctgggaggccagaacaggactgatccagacccctgaatgtggatgtcaatgaggaggcctccacactctacggggccctggtagtggatcagtacttatccctggcataagaagggactttgggagcccatcccacatggaaggatgctctctcagcctggacacatggggaagggcctaggccctgtccaggatgatatggctgacttttgggaaccccccgtggagggccttaccctccctgggcaacagaagggtattaggtggggggctggtggaggttgggggcaggggggagagggagaaaggattgccatgtgaagcagccttgtttctaatttgaactaataaaaatctcttgaggaaaagaaaaaaagcattgtttctaatccagtatcaagagcttaatctggaagtgggaactgagaactgtttctctcgttccagctgtcattctcctcaggctcactgggtgttgtaagagaaagggattcctttaagttttgtggtgttttcatttttgctttgatcctgcttacacaagtgcacagtatgataaacaggaatgactccagttactcattatttggaatgcgttcctctgtgtttagacattcctcctagtgaccttgaaaacaaagaaaataatgccaatcagaataaaactttagtatcttttcttccttgtctgatagatcactcaaaagagaatttaaatgccccatttcaggcagggttctatgaagttggaactaacaggcaggtctgctgtcgatgttaatcagtaaagtgacagttttggaagtcacgtaacagtgtgaacccaactccagggaacttgtagagcttgattctaccatccatcaatgatgaccttcaaagctaaatttcctcttctggaaaatggaaatgaatttaatatctaatgtacatgaggtatcattaagattaaagatgactgttaattattttagagactctaagttaaccaatctcaaaaactaaaatattatttttgtaaagatatttatttatcatcattcataatttaaaacatttgagggtctgtcatgttcactaataatagaagcattagacaatctactagatacatttttcagtggcatgttttgtggtcattaagcgaacacttataaaagtaatgactggaggtgctattcctagaagcagcgcatagttctcaggcccaggagtgagatacctccacaggatttggtcaacaaggtcctagaggccctgaagcaattcaagcatgtttttgttttgtgttgtgactcactgagcttaaccaaagttatctgtgtgaccatgagtgtggaattatcctctgaaaattggtggggtcacttttggatatgcaactgaagaccacaaatgcccctctacaaaatccatcactagccactagttaagaagggagggattggccctttccgtggactcatcgcagaccaggtgagccaccccctgcttttacccaattcttgtcctaagcgccattcacccagatccctccaggctcgtccctgcttaaaacagacacgcccaggctccgggaggagcttcctgaatctggcttggttcaagacactcttccttccctttccgtggactcatcaaagaccaggtgagccaccccctgcttttacccaattcttgtcctaagcgccattcacccacatccctccaggctcatccctgcttgaaacgcccaggcagggaggagcttcctgaatctggcttggttcaggacactcttccttccctttccgtggactcatcgaagaccaggtgagccaccccctgcttttacccaattcttgtcctaagcgccattcacccacatccctccaggctcgtccctgcttgaaacagacacgtccaggcagggaggagctccccgaatctggggacaggccgctcttcattccattcccggcgaccgatccgccaagaggcctaacgccatcagagtgaggagggtacgaggagaggcaagaccatccagagcttcggacattgaattcctggcccacacacactacagagtaacaagaggagatagagagatcctacctgcactcactggaaaaagatatgggaagaagacagaataagaactcactcaacaacagaaagaccaatatgacaccaccagaatctagggactccactccagcaagatctgaaaagcccaacacagtgcatgaagaagagatggacctcaaaaattatctgagcaagatgatagagaccttcaaagaggaaacaagaaaatcccttaaagaaatagaagaaaaagtaagcaaaaaattacacgatatggaggaaaagacaaaccaaaatattcaagaaataaacaaatctcttaaagaagctaaagaaacccaagataaaacaaccaaacaagtgaaggaagctcttgaaacagttcaaaacatgaaagctgaattagacacattaaagaaaacacagaatgaagcgatgctggaaatggaaaggttggataaacgatcaggatctaaagatgtgagtataactaatagaattcaagagacagaagagagaatctcagctattgaagactcgctagaggatatacattcatcaaccaaagaaaacctcaagaccaacaaatccctaacacaaaatatacaggaaatatgggacaccgtgaaaagaccaaacctaagaataataggtgtagaagaaggtgaagaaacactgctcaaaggtacagaaaacatattcaacaaaatcatagaagaaaacttccccaacctacagaaagatatgcctatgaaagtacaagaagcttataggacaccaaacagactggaccacaaaaagaagtcccccgacacataataatcaaaactccaaatctacagaataaagaaaaaatattaagagctgcaaaggaaaaaggccaagtaacatataaaggcaaaccaatcagaatcacacccaacttctcaatggaaactatgaaagccagaaggtcttggatagatacactacaagcactaagggagcatggatgtcaacccagactactgtacccagcaaaactttcaatcactatagatggagaaaacaagattttccatgacaaaaacagatttaaacaatacatatccacaaatccagcactacagaaggttctggaaggaaaactccaacccaaggaacataactacatgcacaaaaacacaggcaatagataatctaatattgccaaacacaaaaagaagcaggagagcaaaatccacacacaatgacaccaccaacaataaatccaaaccaaacaagaaccaacgaacaatggacattaatatccctaaatgtcaatggccttaacttacccgtaaaaagatataggctaacagaatggatacgaagacagaatccatctttctgctgtttacaagaaacacacctcaacttcaaagacaggcgatacctcagagtaaaaggatgggaaaagattttccaatcaaatgcctcaagaaacaagcaggtgtagcaatcctaatatctaacaaaatggactttaaactaaaatcaatcaaaagagatgaagaagggcatttcatactcatcacaggaaaagtccatcaagatgaaatctcaatcctgaacatctatgctccaaatacgaaggcacccacatttgtgaaagaaacattactaaagctcaaaccacacataaaaccacacacacttatagtaggagacttcaacaccccccttacaccactagacaggaccaccagacaaaaacttaacaaagaaacaaaggatctgaaagaagtcatggcccaactggggttaacggatatctatagagcattccatccaaactcaaaagaatataccttcttctcagcaccacatggcaccttctccaaaattgaccacatagtaggcaacaaagcaaacctccacaattacaaaagaattgaaataaccccctgtatcttatcagaccaccatgcattaaagctagaattcagcaacaatacaaatggcaggaaacctgcaaacttttggaaaatgaataacacccaattgcaccattcctgggttgaggaagaaataaaaaaacaaattaaagacttcctagattctaatgaaaatgcagacacaacatacccaaacttatgggacactctgaaagcagtcctaagagggaagttcatagcactaagtgcccacatgaagaaactagagaaaagtcacattagagaactgacagaacaactgaaaacactagagcaaaaagaagcaaactcaccaaggaggagtagacgccaggaaataatcaacctgagagctgaaatcaataaagtagaaactaggaaaacattacaaagaatcaatgaaacaaagagttggttctttgagaagatcaacaagatagacaaacctctagccaaactaaccaaaaggcagagagagagcacactaattaacaaaatcagaaacgaaaaaggggatataacaacggacactgtggaaatccagagaatctttaggtcatactttgaaaatctgtactccacaaaattcgaaaatctaatggaaatggacagtttcctgtataaatatcacttaccaaaattaaatcaagatcagataaacaatttaaatcgacccataacccctaatgaaatagaagcagtcatcaaaagcctcccaaccaaaaaaagcccaggaccagatggcttcactgcagaattctaccagaaattcaaacaagagctgataccaatactcctcaaactgttccgcacaatagaagcagatgggatattgccaaactctttctatgaggctacaatcactttgatacccaagccacacaaagataagactaagaaagagaactacagaccaatatctctcatgaacattgatgctaaaatactcaataaaatattggctaatcgaatccaagaacatatcagaaaaatcatccaccacgatcaagtgggcttcatcccagggatgcaaggatggttcaatatacgaaaaaccatcaatgtaatccaacatataaacaaactgaaaaaaaaaaaccacatgatcatctcactagatgctgaaaaggcctttgacaaaatccaacatcccttcatgataaagatcttggagagaacaggaataacaggaacatatctaaacatgataaacgcgatatacaccaaaccaatagccaacatcaaactaaatggagagaaactcaaagcatttcctctaaaatcaggaacaagacaaggatgtccactctctccatacctcttcaatattgtacttgaagttctagctagagcaataagacaagatcaggatatcaaagggatacaaattggaaaggacgaagtcaaactttcactatttgcagatgacatgatagtctacataagtgacccgaaaaactctaccaggaaactcctacagctgataaacaccttcagcaaggtagcaggatacaaaattaactcaaataaatctgtagtcctactgtatacagatgataaactcaatgagaaagaaatcatggaaacatcacctttcacaatatccacaagcaacattaaatatctgggggtaacactaaccaaaaaagtgaaagacctgtacaataagaactttgagactttaaagaaagaaattaaagaagataccagaaagtggaaagatctcccgtgctcttggataggcagaattaacatagtaaaaatggcaattctaccaaaagcaatctacagatttaatgcaatccccatcaaaatcccaacacagtttttcacagacattgaaagaacaatactcaactttatatggaaaaataaaaaacctaggatagccaaaacaactctttacaataaaagatcctctggaggcatcaccatccctgacttcaaggtctactatagagccatagttctgaaaacagcttggtattggcacaagaatagacagattgaccaatggaatcgaattgaagacccagatattaacccacgcacctacgaacaccttatttttgacaaaggtgctaaatccatacaatggaaaaaagatagcatcttcaacaaatggtgctggcacaattggattcgaacatgcagaaaattgcagatagatccatacctgtcaccatgcacgaaacttaagtgcaaatggatcaaagatctctccataaacccagccacactgaatcttttagaagagaaagtgggaacaacccttgaacaaattggcacaggagaacgattcctgaacatcacgccagaagcacagacactgaggtctgcaattaataaatgggacctcttgaaactgagaagcttctgtaaggcaaaggacacagtcagtaagacaaaacgaccacccacagaatgggaaaaaatcttcaccagccccacatctgacagaggactgatttccaaaatatacaaggagctcaagaagctagccaccaaaacaccatacaatgaaattaaaaagtggggtgcagaactaaacagagatttttcaacagaggaatctgaaatggctgaaagacacttaagaaagtgctcaaaatccttggccatcagagaaatgcaactcaaaacaactctgagataccacctcacacctgtcagaatggctaaaatcaaaaataccaatgacaacctatgctggagaggttgtggagaagaaggaacactcctccattgctggtgggagtgtgaacttgtaagaccactttggaaatcagtatggcggttgctcagaaaaatgggaatcaatctacctcaagatccagccattcctctcttgggtatatacccaaatactgcttgtccatacaacaaggacatatgttcaaccatgttcatagcagcattgtttgtaatagccagaacctggaaacaacctagatgcccctcaactgaagaatggaaagagaaaatgtggtacatttatacaatggagtactactcagcagaaaaaagcaatggaatcttgaaattcgcaggcaaatggatggaactagaagaaaccatcctgagtgaggtaacccaatcacaaaaagacaaacatggtatgtactcactcatatatgatttttagacatagagcaaaggtttaccagcctataatcctctaccccaaggaaactagaaatcatgaatgactctaagggataaatggaccccaggaatgggaaatggcatgaactcccgagctaattgagagcatgagggtaaggaagtgggtgctgccacaataagagcacaagatgaagagtagaggagaagaaatggaggagcagatatattgagttgggggaagaatagaggagagagagcaggatgagagataccatatcagagggagcactataggtccgagaagagatctggaactaggaagatctccagagacctataaggatgacacgatctgacagtctgggcagtggaggagaatatggcctagaaacccttcccctagaatgagattgatgaatactctctatgctattctagagtcctcatccagtggctgatgagagcagagacagacatccacagaaatacactgagctgaaatctggaactcagttgaagagagggaggaatgaagaacgaagggttctgtacctggttggagaaacccacagaaacagttggcctgaaaaagggaaagcatatcgaccccagatgctctttgggaggacagtacaggactaatccagccccctgatcatggatgccaatggggaggcccctgcactcctggaagcctctggaggtggactggcgttttgccctggtgggtgggagggacttcgagagcccatcccacttgaagggattcgctctgtctctgaacacatggggaggggcctaggcccagcacaggaagatttggtggacttggtggaaccctggttgggggccctaccctgcctggggagtggcgggtggatggggtgtggggtaggttggaggtgggggagaaggaatgtgggtggggggagggagagggagagggaaagtacatctgaaaatattaataatttaataaaaaaatgcaaaaaaaatcctctccagaaacaatcaatgcattgtaagaatttaagatcagaaatttttaaaatcttaaattctcttagatcatacaatgcaatcaaaaagtaaaactttataattcaaagaattttagttgaatttatgcaaccgattgaactattccctaggcaaactataggctgaatttgcctaatgttactatttactatgtatcaaaagcatgctttgatattgtgttactttcaaaatttttttcttatctatgtaactattattacatcatatttcaataatgtttagctcctttttttctagtcctttcctcctttgaatggtatcttgtagtgtcatcttgatttgccattgaacttgtggtagtgtcaaaaccctttgggtatgctttcaggtgcagacctgtttcattataaggtagagtaggggctggcatagtctcttctgtttgagagcatggaaaggcagagactgcatcttctggagcacttctttactcttacctgtgtaagtgcttccccaataaatacctatttatcattaaaaaaaaaagaagaagggagggattgggtcccatgaaccccacctcaatccatgattgtcttttgttttattttggggggaaggctttgaagtttcaaagacttgtcattctcagtgtgtcctctgtttcccatctgtgcttcaagatgtaagctctcacctatatctgctatcatgccttcactctgccacaatagattctagttctctgtaaccataagcccaataacattctttcttatataagttgccttggtcatgacattttattgcagcagtagaaacataagtaatatagcattcttgtggggggtgtgtgtgtgtgtgtgtgtgtgtgtgtttgaactactaagtttaaaaaacatgctgttatggtagaaagggactagtaaaaaggacaagggtaggaaggagactagagagggtgggtgtgagaataatcagaatgcattatacacgggtatgaaactgtcaaagaacaaacaataaaaaataatttagagagcaaaaattgtggacacttttacatgcatttacgtgagtgatttgaaagtaattacttagaaactctctaacaactcccacagggaccatggtactcagaagaatgtccatactatttcaatgctcacatccaaattccctttgctaattttcatactgaatgtggggttcataaaacagtgattatgggaaagatagtttgggaataggaagaaagtcacaacaatgtgactcccaagacttgaaggctaaagagatgacattgaagcaggccatagataatcttcataaggccttcacctacaaacacaatgtttgccttcctcatctgcactgaggcctagcaacccaggccttaatgatatgggctcatgattggacactgaagaatttaggtaaggacattgaactattggagtgtggaaaactgcaggatttgcaggataatgactgtgacattgcagaataaatagtggaaggtttaacagctgtaaatagaaacattgtgttaagtattaggaagtcgggaatgccttcaggagaaggagcaacagacatagacttagcacagcaaaagaaaaggaaggttttactagaaaaaaattaattgcaaagaaggaacaggttttgttccagtttcagccttaggatgatccttgaggatcatgaaacctttctctgcaaaataatcacctccttttaaaaccctacattcgcttttaaaactgtatccatttcagatgcatatttgtatgcatcctttgcccatggctgactgcataaacagcaatattcccaagcacacagatccagcacccaagccttttttctgcttgatcaatccccataagaacatgcaaacaaaaagaacaaattggctcaaagagaagttttatagtgagtcattttccatttttgagtgtctttgtatgcatcccttccttggtaggcaaggaagatgatgctttcagaacaaaggaaaaaaacaagttaattgagagcctatttcatgctagggactttacaaactttaccatatttattctttacatagcttcatgaagtaagtgttatatactttgtcagcttacaaagcaaactgggggaacctaaaggattccttccaggtaagaacaagaaggaggaagaaacaaaattccaagcaagtgatgccctgttcttaagcccttgacatggtcctgtagttaatacaaccaagaagccaagtataacatttctcaaggtcaaagaactactttgtaatctgcatcagagaaaaacatctctatcttgcatctttgaggccagagcagaaagataagcaaaatagtttcttagggtctggaactgcagctcagtggtagagttatggccttgaatgcttaagtacttaggttcaatgacaagagataagacaggtgaattcaaattctatatctacattatttttcaaagtcattattttccaaagctttcccaagcatgcttcctagctggacattgaactatatctctatgtgaaagtgccaggtaattacgacaaattcagatgctaaacctaaatatatccccctcctgtgagtaaatgtttacccttttgtcaccatcataagtttcccaagacattattgaggaattgaaaggcaaagactgacttcacaactcacttgctaggtgactttctgcatgtcacttaagtctacaagaaatagtatctttctataattgatctttgagctagaacatattgctcagtcctcactgacctggagaaaaatacattgaaataaaattcccctcagttcccccacacacaacttcataataaaagaatggacacactaccgagggaaaagtggtggcttgcattatgtccacctgtggtaggatgaaagccagaaattataaatcccaagttaaacagacattatttgatatttcttcattggaagatcaaagaaggaaattctccttaccaacggtctacatcatcctggtaatgttaggtttgggggaggagaaggaacagaggtttgagaaagagtgggagattttcttcagacagatcagctcacactgcagcagagcaacatggcaggggtttgtgtaagaagctccagtcctgacaggcaaagaaggtgtctgactttaaaggtttcttttttaagattttagtttctttttttaattatatgaatatgttgaggctgtctgtgctcacatgagttcagagtctagaagagggcatcagatctcctggggctgaagttacaggcagttgtgagctgcctgtcatgggcattaggaactgaacttgaatcctctgcaagagcagcaaatgctcttaatctccaagacatctctccaaactctgaccttaactgtttctgcaggaagggggggtcatgcaaattaggggtcaggtctacttaatatatggctgtatgaccagatgggggaacaggacatgtgtaacttaggatacatgaccggggtctctctcactctgaacatgggagtggagcttggttaatgtgtgacccaagtaatttgacagcagtcaggcttcctctgaccctggagtagcaggtaacggggtatacatctgctttgttcacagccttatctgctaagggactggttaaacctgtattcccctcctttttttcatgtctggaccttagccactttcttcactaataaactcatctgtacggccattcttttttttttttaactttcacaactgcaatttattggttgaggagcaaagtacacagacatttcaattcttaacacatgcacccaatctctgaagagtcatacattgtgttcatgtaccccaagagtcacgtgttgtttctctttgaacttatttcagtgatgttccagcctcaaacctgtcaagttttccctaagaccgcacataaaacccaaatgctcacaatcctcaattccactgactcacaattttatgccacatacagcacatactcaaaatgcccacctttcacagcattattatcacaattgttaggaaaatggacggctatgaccatcagagtcagttctgacaaggaaaggaccgaggagtggtttttttgggttttgggggggttttggggtgttttgttttgttttgttttgttttttgttttttattttttggtttttaggaaacagttctgctagaaacatgagaccagatgtaactgaaaatactgcagacacaaatgcacaaccaagaccccaaacccttagtacgctatatgctgtaggatataaaactagccccctctacagaatgttatggtgaccccgagacagtcacagcctctcctgattgagcattctattttctggttgtaccaaaaaataaacaaccagcaaatgatttaacctctttaaaaaatcatttacacttaaaaaatgggatgaggtgagatttcctcccactttttaaaatgtttctagagctactaaaaaactcgaatttgcaaaatagttgataaaaatattcctctggattgtacacgaagagaggcaggaaccactgacagacatgacgaatggttagtcggacttggcttctttctcttctacctcagaggctggactctggttctccgtttctccgttctgtgcaggcagatctgcagtctgctggtcagctgcttcagcctgtttgccctttgctcccctcttcccttttgtttgcactttttgtctgatgatttatcctttcctgctgtgtatggccattctttgtcatcttttttctgttgctgtttaaaccccatcatttaccgccaaaatatgagaatccatgaaatgaaatttaaaacttaaatggtatcatttgtgtgacacagcatgtaagaagtaaaagaattccatttccactgtgaaacaattaacaattccattgtgatggggagaagaaaaagaaaaggtgatgaaattcacccttggaagtggttgggaaaagtcagtaaggaggtccttacataaattgtttttagatttgtgtgttctgaaattgataggagttggtggcaaatgcctttaatcccagcacttgggaggcaggaggatctctgtgagttagagaccagtctggtttataagagcgagttccaggacagcctccaaaaccacagagaaaccctgtctcgaaaaacaaaaacaaaaaaaagaagaaagacacaggaatgaggaggtaggagaaatttgtcttatttctactctgccattggctttctatatgactttgaggattttattttcttttattgtgctcaatttggtatcattaaattataattaatttaatttatataattataatttaattatcattaaattataatatctacctcagatatataccttaagcctcagaatgatgctaagaaacatatttaaacatgtggcaggttataaaacaataatagctctccatgtggatccctattgtgacaatttattctagtgactttaagatagatgtatagatagatggatgatatatgataggtgatagatagatagatagatagatagatagatagatagatagatagatgatcgatggatgggtgcatgcatagatggatggatagatagatagatagatagatagatagatagatagatagatagatatcacacaaatgagaatacacaaatgatgccactgccagggtatggaggtcagaggacaactttagaagtttgttctctccttccatcatgtaggctctgggaaataagctcaggtcttcagacttggtagaatgtgcctttacatgctgagccatatcaccaagatttccgtgtcttttaaactatagaaccaaaatgtagtaaaatgaggttatgtggatttacagagctggagcctagaacctgttctgtgcacccatatttaaggctctctttcttaaagtttctagaggcaagttttaacagaatccaaaaaacccaccaagttggatatgaaaacaaattgtctagtctaaactacaacttgtactaataatagagctgagacaagtagaatcaagtgcttttcccaggtaacagagcgggttactgaagaacatgctatagtgacaaagtgcatacttctgcatattctgtctcttcaggatgcaaacctgactttattgtttcagtgatactggcatttccttcaacagtgtgcccagaagaaggaatgtcactcaatggcactgagaaatcacaccaaggtgactgaatttattttttgtggccttacccaatctcaagaactgagcttactcttgtttttctttttatttatggtttatttgctaaccgtgttagcaaatgtcaccataatggtcaccgtgacttcagattcccgcctccacacccccatgtacttcctgcttcgcaacctctctgtcttagacatctgtttctcctccatcactgttccaaaagtcctagtggaccttctttcaataagaaagaccatctccttcaatggttgcttcactcagatttttttcttccacctgcttggtggggcagacattttctctctctctgtgatggcatttgatcgatacatggccatcttcaagcctctgcactatgtgaccatcatgagtacggggcggtgcacagccctcatcgtggcctcctgggtggggggctttgttcactccattgtgcagatttacctcttgctcccacttcctttctgtggacccaatgttgttgatggtttctactgcgatgtcccacaggttctcaaactggcctgcgctgacacctttaatcttgaactactgatgatctcaaacaatggcctgatcactacactatggtttgttcttctccttgtatcctatacagtcattttgacaatgctgaggtcacacacaggggaggggaagaaaaaagccatttccacctgcacctcccacatcaccgtggtcaccctacactttgtgccctgcatctatgtctatgccaggcctttcactgccctccccatggacagagctgtctcagttaccctaaatagtattgttcctgttctgaacccaatgatctacagcctgaggaaccaagagatgaagtcagccatgaagagactcaagaaaagactcatactttctgaggtagaataattctggttgtgagaaagggaaacatataagtgagtctttttttttaacattgggacttggctatgcacaaccaacaatagtaatgtatacgaaagatctgactcataaattgtttgtaagcacagacatcagtagaaaactaaacaagaagaatttaagccttgaagagagaccagcagaaaacagggactaaacatgatctatagtagaagtgctgagatggcccatcaattgtcttaaggacagggtttgatttgagacatataggtgttaacagggtcatttgtctcaaaattgcaggtctccagcacctatatctccatttactggcagttattctgtgactttaagggttctactatgaggtaaacactgttaataattttggccttcctttttaagtcaacatacacttattataaatggtttttaaagattttctgctgtcattcactccctaggactctcaaatttgactgtgaatttgacttgcagtctgtctttgtaaaatctcaatgtataaatacataaatgttgagaaactagaattacttttcctacatttaacatccaccttgtacataattgatttgagtgtttgaaaacataaagacatacccaacacaataaataacttttttattttcttatgcatgctcctttggggcttcctttactatggtatattaaaatccaataaagttgtcaaatcaacagatataattgccccttatagtttcaatgtctatatagaacccaacccatttacttgtagtaaatatcacttaaatttgtgggatggcagaatcaaagccttgtaaaaatcgattccaaactcaaatcagtcttagactttcctattttgaggattgaggttgattttttgacacagggtaccatttgctatgcagggtggagtggaatgcactgccctcaaactcacagtaacaattctgtctcagcctctcagatgcatggattatgggtgtcaaaagttagactcaaaaactttgctagacctgtgcacacaatggtataattacaatgcagtcaagtagcgttagcagaaatgtcttcattccaaatttcaaatagcctatgtattgagtagagagagccctggaaagtgaactgcaggtaatcacacacagaagagcaaaatcatttccttcttcctccttctgtaccattgtatccagaaagactgaagtaaagggtccactaaaatgtatctaataactagtaatagagatgatcatatctgataataatatgcaatccatattaatttatcaaaaacagatagactttggaaattataatttttgagagctagaggataatactgtacacctactgcatatgatcatctctattactagttattagatacactttagtgaatcctttacttcagtctttctggatacaatggtacagaaggaggaagaaggaaatgattttgcttttctgtgcgtgattacttgcaattcactttccagggctctctctactccatacataggctatttgaaagttagaatgaagacatttctgctaacactacttgactgcactatttccttgtgggagaagctgaaaccaaaaccctttgatacttccataggaaatatggggctagtcccaagatggataaaagtatatacaaatactatctgtgaattcatgttgtctcagataaaattgtgccaaaaagttaggtcagagtaagttcaagatttactagcaagaaattatgttagagaaataagacataaaagataacataaatgagccaggcgttggtggctcacacctttaatcccagcactcgggaggcagaggcaggcagatctctgggagtttgaggccatcctggcctccagatcgagtgccaggataggctccaaagctacacagagaaacctgtctcaaaaaaaaaaaaataacataaatgtgaaaacttatgcatagcttttttaaatcagtaaaaatgatactgaaagcagtagatttatggtaagattacaacaaaacatttagaagtgaaaattataatgaactgaaaactaaaaaaggatcacacatggacagagacagaacaatcggtgcacgatgtgattggtggacatgtagaaaaacataaatgaatgtgataaatgctaagtctgagagaagttcccaaagaaaatagtagtaacgtggaaatgacattttaggagataatagttgaaaatgtccataactgatgaattatacagatgcccagattcaaaatatatcaaaaccgaatacaaaaactgagctaaaatgaaaaaatccctgtgatgactcaattgcacagttaagcaagcagaagaaagaattaaaattttttaaaacatggccactaaaaccacactcacaaagcacacctgcattttttctctaaagaacccaaatcttggtcctcatgctccctagactggcactctaccaactaggcttattccccagctcctgtaatagctttgtttctttatgaggctcataaaatacactctagggcagaagtgcagctcagccatacagcatttatccagcacatatgaggccctcagtttgatccttaaagttgacataaaaaccaatagctgtaaattaatctcctttgtgcatattcttcattgtctttccatgtactcaatgaaaactgctgtgctaatgagctaatggatttacctcactgttctgggctgcctccccaccatcccactatactaattccactttagtcagagtggccagcttctcccattctcctcattctcacagctggattctcacagagacccaccgagtttgtttcccagatcccctgttgtcccgggggaatccaaggcctctagcagccacattcacctgtatacacacaacctgtgattaaaggtgaagggtggtccctactcttgcagaggatctgaggtctgttctcagcaccaacattagtgcctgagtgtagccacgcctccttaggggctggctacaggtgtgcctgaccacgcttgtgagggcatggtcagagtgacatagtgtgactgcgtttgctctttcggtttcactttggtacttgctgcacagactgctgccacaccgactggctaggtcgctctataagtaaggcttttccctattaaataccttatatttctacctgactccgtattagtaatttcccactatacctgagctataacttgagctccaattgggtatgatgctgtcttccaaattccacaagcacctacactcactcatgtgcacacatttataatttaaaataaatacttttaaaaaccatgcatcgttactaagtttctctctgtttttaactctggtttgttgtgtttatgttttatcaactaaaataattccataattttcttggcttcttgagacaggtctctctatgtagtcctgtctgtcctcactatgtagaacagactgggcttgaattcacagagatccccctgcctctgcctccccaagtgctaggattaaagtgtgcccccactccaagctaatttcatttattttaaaatacctttctcttcccactagaatgtgcatctatctcactatctcattgctagtgcctagaggtgtgtggaaacgggaattgataacattgggaagagtaggaatcctgtagtttgggctggtctccatctcacagtgatgggaaggctacccgtaaagtcccgacccttctacttctacctggagtgctgagattacaggtgtgaaccaccatgcccattttaggcaattgaacccagagcaccacatatgctggagaggtattctaccaactgagcaatataccccgacttcagtaatgatatcattggatgaatactagattttaccttttctgcatgctgaatataaactagagacaccagagttcctataccattgctaatgcttttcttggttaaatggcagttcctgcttcatattcatttatttattcttgttgcaatttattttttatttttttattctttatgacttgcttttttcttttttattagttcaaattaggaacaagcttgtttcacatgtcaatcccttctccctctccctccactcaccctcacccctcctaccccaccccgatctacccccgaccccattcaccctccactccccaggcagagtagggccctccacaggtgctccacaaagtccaccacatcatcctgggctgggcctaggccctcccccatgtgtccaggacaagagtgcatctcttcatgtgggatggactcttaaattcccttcttacaccagggaaaaatactaatccactaccaggggccccctagagtgcagaggcctcctcattgacatccatgttcaggggtctggatcagtcctgtactggcctccccaacagcatctagggtcaatgtgttcccccttgttcaggccagctgtttctgtgggttttaccagctggtactgaccccttcgatcttcattcctccctctctgcaactaagttccagaattcagttcagtgtataactgtggatgtctgcctctgcttccatcagtcactggatgagggctctatgatggcataaaaagtagtcatcaatctcattttaggggaagggcatttaggttatcctctccaccattgcctggattaaccttcacaatatccacaagcaacataaaatatcttgggataacgctaacgtaaaagtgaaagacctgtacagtaagaactttgagtctttaaagaagaaattaaagaagataccagaaaatggaaagatctcccatgctcttggataggtagaatcaacatagtaaaaatggcaatcttgccaaaagtaatctacagagtcaatgcaatccccatcaaaatcccaacacagttcttcacagaacttgaaagaacaatactcaactttatatagaaaaacaaaaaaaccaagatagccaaaacaatgctgtacaataaaggatcttctggtggcatcactatccctgacttcaagctctattatagagccatagttctgaaaacagcttggcattggcacaaaaatagacagatagaacaatggaatcaaattgaaaaccctgatattaacccacacacttatgaacaccttatttttgacaaagatgctaaatctgtacaatggaaaaaggatagcatcttcaacaaatggtgctggcacaactggattaggacatgcagaagattgtagatagatccatacctgtcaccatgcacaaaacttcagtgcaaatggatcaaagatctcaccataaatccagccacactgaatcttctagaagagaaagtgggagatacccttgaatgaactggcacaggagacggcttcctgaacattacaccagtagcacatacattgagatctacaattaataaatgggacctcctgaaactgaggagcttctgtaaggcaaaggacacagtcagtcagacaaaacgatagcccacagaatgggaaaagatattcaccaaccccacatctgacagagggctaatatctaaaatatacaatgaactcaagaagctagccaccaaaacaccaaacaatgaaattaaaaagtggggtgcagaactaaatagagaattctcaacagaggaatctgaaatggctgaaagacacttaagaaagtgctcaaaatcattggcatcagggaaatgcaactcaaaacaactctgagataccacctcacacctgtcagaatgtcaaaatcaaaaataccaatgacaatctatgctggagagggtgtggagaaaaaggaacactcctccattgcttgtgggagtgcaaacttgtaagaccactctgaaaatcagtatggtggttgatcagaaaaatgggaatcagtctacctcaagatccagccattcctctcttgagcatatgcccaaataatgcacattcatacaacaaggacatatgttcaaccatgttcatagcagcattgtttgtaatagccagaacctggaagcagcctagatgcccctcaactgaagaatggatagagaaaatgtggtatatttatacaatggagtactactcagcagaaaaaagcaatggaatcttgaaattcacaggcaaatggatggaactagaggaaaccatcctgagtgaggtaacccagtcacaaaaagacaaacatggtatgtactcactcatatatgaattttagagcaaaggattaccagcctccaatcctcttcaccaaagaaattaggaaacatgaaggactctaggtgataaatgcatggaccccaggaatgggaaggggcaagaactcctgagctaattgggagtatgagggtaggggagagggagctgccagaatgagagcaggagaagaggagaggagaggaggaaatggaggagcagaaatattgagttgggggaagaatagaggagaacaggacgagagataccatattagagggagccattataggtctgaggagagatctggcactagggacatttccagagacctacaaagatgacgcaaactgacaatccaattttatttttatcttcaaattccaaatcttatataacaaaatatattggcaggcttattcaaattcttcaacaaggtgtattgcttgacctaaaggctcctcttactgtcatattatacttaatttatgaaaccataaatctctttgacaaagaggtaccctagtctcttctccctgtgttgatcctacttctctgttcatataagctgctttttcattaaatatgatagatgatgtctgggaaagaaagaaaaaagtcaaactaagtgttcatttagccctggatcactttgatgggacagagtccatgaccctagaagtagcaacagattcaagagcctctaatgttttattgcttaatgaagaattatgagaccactagaggtccagtctttctcacttcttcacagcttgtttccatatagatatatacatatgtatgtataatatatatatatatatgtatatgtatatatatatatataattggcatgctttaacagagcataatagactgagaattaggggatttgattgctctcctaccattagataacctggatatggactacatagtttttatggggtttttccataacagggtgctgtttctttacacatcagtgtatctgtcagcaaccatttaataattaccactgaaattccaccacgaccagaaaaactagcctcttcaattccacacccttgcctaacagctaccctctgcctagctctcataaaaggcctgtgactcttagggatcaggacacaacactggttcccagtgcaaaacattgaatatacaatcaaatagcttcttccatggcctctaagaaatttgtacaccagccaaaatgtgccgggcatgtgtgcacgcacatgcgagttttgacagcattttaatgaatcccattgaaactacatcatcaaaactagaatcagttacagctgcttccctgtccaatgatatttcccttgtcattcttacattaagcctgaggttaagggatttgagcataagacaggaacactgtccaagtccaagaacctcaaataggcaaatccttgagtttgccgtctctctcctgaaaatggagcaaggacactgaaatcttcagtagcacattttctttcaagaattaatgttgttgcatgctgcacctaattgcgttattattttcacttgaagttttaggactaaagacaatgaagacatttagcaggtatctggcagtaaggttgtgtgtgctgaaattcaaatgctgtcattgattatgtttaaccaagttgactttgaatattttccagggctatcagatatttcagaccacagatgatcatctcaccgacaaactcatcagaggtaggtttggaaatgagggtgtgtttaaaaggaagcaggatgtggcacactacataaaagccatctggaattgagagccctttggttgcttactgtgtggctgctacatgttaaaactgatgtaaggagtttctgtcaaatgagcttcttcagccagatgttttcaaaggccactgtaaaacaatatgtgaaactatagagcctgaatttggaggggagggacaatgcatctctattctgtttccatcttctcttgattatgcaagcctgcttgcatgagatacagacttaggagatagtagggcataaatcaatcattcatttatcaaaaaataccaaagagccgcagaatgcaacaatgaaacatgtatgaatgaggcaatgaggcaagggatcatctgttacctagagaagtgctttcattgcactcttccctacactgagagattgcacagcttttttttttttttgcgttctctgtgtgactgtgacatttcaccactgactgctgttatttttccacctctgttattcttccagaatgtaacagtctttgtctcctctaggagccctccccataccagccctagatagaatgccgctgtggttcccatggctgtggatacactgaaatacttgtatttccaccagattgaacatctctccagagtgaaacctttgctgcacttgtgtctgtgttgtgagtataaatccaaccccgatggtgctgcaagcaccaccaaatgtgtgagaaaggactgaaggattgaatgtatacctctgaaactcctaatcaattcagtgtatacctctgaaattcctaatcaacactgtgagcaatgtgattgactgtgacttgaggaagactggtcccattttctgaacatggtctctgctgcacagccttattgggactcctgcagatatgtaacacaccaggttttttttgttctgactccatatttatcttacaactgtttaaactgataactcatttgagacttttttttctactacctttactctaaaattgaattaaagaaataacacaatcctgctgaatcattgtacaattattgttgtgagacatcagattgctttggaaagtaacataatcatactgaattttagtttcatagtgtagcaatgtattgaggttggggaaattagttcacctctctttcttcaagtactaaaaataattaaaatccccttctttgtaggaacacacaagagagtcggtgacacgatacctccacctttgagatgagaagactgtcaagaaaccctaattccacaactgctcttcctcagcaaactccaaatgaatatgatggtgatgatgcagacaggagaggagaatgaggatagtaacaggacagggaagcagttctccaggtggcgcctttcctttggtagaggctgaagtggggaacccacagtaagacacaggaagctacatctttcttcagtccttggcctttcgtgtgagcctccccttgacccagcttcctccttctccctgactgctcagaccaatatggtccatatagttcacagatgagaattcagaactccttttgttcagctaatcagtggcagaacatgaaggaataaatccagtgctacactgtcctagtgcagtgtatgtactttccccccttctctacaagtaccgctcaccttttagggaaaaaaatcgtgtttcaggtgtccaaaacttccacctgtcctgtgttcaaatgtgatctatacaatgtagaaaatgaataataatgttaacacaatggggacacttaaacacaagaacccaatgatggtacttacatttcatgttcttaaaaagtcagcctgtagctaccaatgtaagatgagtggccaagagacttgaatagaatttttttaattttaattgtgcccttgtgtttaatccatttacatgaaatagtttcctgtgcccaagatggtagataagtacctcagtaatgaatagtgattttctttttcattaattgaattttttgtttattttacataccgaccagtttctgctccttcccctcctcctattccctccccctgccttccttctacccctgcccatccacttctcctcaatctccatttcaatagaatttattaaagcagaaaactcataaagcactagactttacctcagtaatgttttctttttaaaatatgttgcttaagtgtcactacctattatattttctttcttaacattgctctgtagggaaataagtaatgactcctttcgcaagtggcagtttgatttgatcactaaattgattacagtataaaatgtggaaaccttgaccacttttaagcattatggcaaaacaaaagaacacagtttcatcctaggaggctagaaaggtaagataaacagagggttgaaactgcccagaaaggcagtgatttaattggagatggaaaattacaccagagtcaaagaacttattttccttggcctgacccagagtcaagaagtgagtgtattgctgtttcttttccttctcctggtgtatgtgacaactctgctggggaaccttctcatcatggtcaccgtgacctgcgagcctcgccttcacacccccatgtatttcttgctcaggaatttgtccattgctgacatctgcttttcctccatcactgcacccaaggttctgctggaccttctctcacacagaaagaccatctctttcaatggctgtctcactcagatgtttttcttccaccttattggaggggtggatgtgttttctctctcagtgatggctctagatcgatatgtggccatctctaagcccctgcactatgtgaccatcatgagcagaggccgttgcattgggttaatagtggcctcctgggcgggaggctttgtccactccatcgtgcagatttctctcttgctgacacttccgttttgtggacccaatgttcttgacactttctactgtgatgtcccccaggtcatcaaacttgcctgcacagacatctttgtcctggagatgttgatgatttccaataatggcttggttgctactctgtggtttatgttgttattggtgtcatacacagtcattctgatgatgcttaggtctcagtcaggagagggcaggaggaaagccatttccacatgcacctcccacatcactgtggtcaccctgcactttgtgccctgcatctatgtctatgcccggccattcactgccctccccacagataaagccatctctgtcaccttcacagtcatctcccctctgctcaaccccttgatctacactctgaggaaccaggagatgaagtcggccatgaggagactcaggaaaagatttaggccttctggtagagaagagcaatagctcctccttataaccatgtttggaaacatttgtatgtgaaataagatttattctttatactggtcatttcccttctcacagtggtctaacacagcctcaaattaatagttctaattctcctgtatactttcagtttgtcaaatattatctcatagaatcaccatgcaaatttcaatgtaatttgtgaaatatgaagaaagagatacatggaaaagattattgcacactgtaatcatactaaggttttgctttggtttttgttttgttttctgagacaaatttcattctgcaggcctgtctactgtagatagaaataactgagtcagaaagtgctatgattccacactcatggcccaggttccatgtgtctaaatcaacaattagaattaaaaaaaaaaacactgttagaatctatccacacaatagtataattacagtgcagtcaagtagtatttgtagaaacatttcaagttccaatcagcctatcttgtccatacatgtgatatgccctggatgcctgactcagtataatcatatacagaagagcaaactgtacttcctccttcctctgtatcattgtacctgagaagactggggtaaaggattcagcaaaggatccaaaacatctaatatcaaatattgctacaatagttcaggaaagaataaattttactataaaagactctaagtactagaataatgaattagataacataaatataaatgtttaaagaaaaatttaaaagaatcttctgtagaaagctgttctggttactttttatcagcttggcccaagctagggtcatctggaaagaggaaatcttgattgagaaaaatgttctcataaaactggcctctaagcaagtctgtgggacatactcttactgattgatgtgggagggtccagaccactgtggccttgccacatctgagaagatggtccagagttgtttaaaaagacaaactgagggaactatgaagaatagtccagtaaccagaaaccctccaaatggtctctgtttcagttctgtttctccgggttcccaccttgagttcctgtcctaactttcctcaatgatggactttgattaagaaatggaagccaaataaaccctttcctccccaagttgcttctggtcagagtgtgtttttttttttgaagactttttattattatttttattttattagttcaaattaggaacaagcttgcttcagatgtcaatcccttctccctctccctcccctccccccaacatcccacctgcccctagccatcccccctccactccccaggcagggtaaggccctcaaaaggggctccccaaagtctaccacatcatcctgggccaggcctaggcccttccccatgtgtccaggtcaagagagcatcccttcatatgggatgggctctcaaaatcccttcttttttttaagaccttacatatttaatacagtgcattacccctgtacaaatggaaaaaaattaagttcaacatttctagaacaatatggctgttaatttttgtacaatgccaactcaacaaggtaaactgggatacttttttccaaagttgacagcacagctaaagtttccaaaaatttaaattatatatatatatatatatatatatatatatatatatatagagagagagagagagagagagagagagagagagagcaataatggcagtatgttatgcaccaatagcagcaacagcttttccaggttctgcagtcatttaaacaaaattgtagagacatccagcactctccattaaaaaaaaagtaaaaaataaaatcacagaaaaacagcacagttctgttactcttgtggtacctggcaccattttttttaattagcttctcaatcaacatctggaaggaaaccattctgagcaacatcattaaaaacagctctgataaagcacggtcactactatgtatcataaagcaggtccacatatgagtgagtacatatcatgtttgtctttttgtgattgggttacctcactcagaatggtttcttcgagttccatccattttcctgcaaatttcaagattccattgttttttttctgctgagtagtactccattgtgtaaatgtaccacattttctctatccattcttcagttgaggggcatctaggctgcttccagtttctggctattacaaatagtgctgctatgaacatggttgaacagatgtccttgttatatgaatgtgcttcttttgggtatatgcctaggagtggaattgctggatcttgtggtagactgattcccattttcttgaggagtcgccatactgatttccaaagtggctatacaagttggcactcccaccagcagtggagaagtgttcctctttctccacatcctctccagcataaactgtcattggtatttttgattttagccattctgacaggagtaagatggtatctcagagttgttttgatttgcatttccctgatggctaaggatgttgaacactttctcatctgtctttcagccattttagattcctctattgagaattgtctatttagttctgtaccccattttttaattggattgtttggtgttttcgagaatagcttcctgagttctttgtatattttggagatcagccctctgtcagatgtggggttggtgaatatcttttcccagtcagagtgttttcatcccagcaacagaaagcaaactgggacaaatgtgaaccagtataacctgaaagcagaggtagacaaaaaagaacaaaatggaacatctagaaatgaaaactataatgaactgaaggctgaacagggatagaataatacacaaaaaggtggttaatgaacatggagaagaaagtaatgctgagcataacaagagtttctgcagaacatgataaggatgaagaaatgctgttttaggagataatagcttagaacttttcacaactgatgaattatacaaatgcaaaacatatgaaaacagaatccagaaatgagatggtctctgtgaggattcaattgcacagttaagcaggcaaaagaaaaattaagaaacttgaaagcaagtccattgaaattatatggtctggatttgataggcacacccacatttaatctctgaagatcccaaccatgcagacaccacaatgatcttacattattaccttagttgattagatgaaagatgtacaggcatcttttcaactggcccagacctagtgagagggaatgccacaggaccactcagacatagatgcagcatcacctctactctattgcacaaacttgagaaagtggctaaagctcattgaggagatgggcatgattacaaagtggaatgatattaacactataaagaatcaaatatgcatgagtataaaattcacaggttcaatgaagtaaagtactaaaccagaagtgaaggcctgtgtaaaatcatcctagagacatagctggtgattgggctttcagagctttgcttcagtcaacaattatttagtacttgctgtataccatgataataaatcaatcaatactttgagagaaaacataaattgtataatctgagaaacaaagagataagcaaaaaagaaatgaagagagtcatagacacttgtgagataccatgaagcaaaacaacctatgcacggcaagagtcctaggataaaagtaacaggagaaaggaaaagggaatatttaaataagtaatggactgaaactcccaacttttcttatacatctataatatatatatatatattatatatataccaacttttgtattatatatatatttatacacacactgcatacacacacacacacacacacacacacacacacacacacacatatatatatatatcatggatagcaacaaacatggcatatcaagttgcagtgagactaagcacctccccatgttaaggctgggcaaggcaatccagtatgaggggtagggtccccaaagccagtaaaagagtctgagacagccctttcctccacttttgggagtgccacgagagaatcaagctacacaactgtaacatataagcagagtgcctaggtctgtcccatgcaggcaacctggttttcagttcagtttctgtgagcccccatgaacccaggttagttgattctgagagttttcttgtggtatacttgacccctctggctcctacaatcctttcttctcctcttcttcgggatcctctaaactccacataatgtttggctgtgggcatctgcatctgttgccatcagttgctggatgactcctctctgatgacaactgggctatgcaccaatctggtcacaggagattgccagttcaggctacatatctgctattgctaggggtcgaagccgagtcttccttatacattcctgggagacttccttgcaccaggtttttacctgaccccaaaatgccctttccaggtggcaggaaataatcaaactgagggctgaaattaataacatagaaacaaagggataaagactttctaataaaattctggttgtttgagaagtacaaaaacattcaatactttgaaatttataaagcagaaaggcttttgtaaagcaaaggaaatggccaactgagtgaagaggctgcaaacatgatggcaaagaaac
